(19) United States
(12) Patent Application Publication
(10) Pub. No.: US 2022/0031831 A1
(43) Pub. Date: Feb. 3, 2022

(54) IMMUNOGENIC COMPOSITIONS FOR AFRICAN SWINE FEVER VIRUS

(71) Applicant: Kansas State University Research Foundation, Manhattan, KS (US)

(72) Inventors: Waithaka Mwangi, Manhattan, KS (US); Shehnaz Lokhandwala, Manhattan, KS (US)

(21) Appl. No.: 17/309,272

(22) PCT Filed: Nov. 13, 2019
(86) PCT No.: PCT/US19/61207

§ 371 Date: May 13, 2021

Related U.S. Application Data
(60) Provisional application No. 62/767,594, filed on Nov. 15, 2018.

(51) Int. Cl. A61K 39/12; C12N 15/86; A61P 31/20

(52) U.S. Cl. CPC A61K 39/12; A61P 31/20; C12N 15/86

(57) ABSTRACT

The present disclosure provides immunogenic compositions or vaccines against African Swine Fever Virus (ASFV), methods of making and using such immunogenic compositions or vaccines, and methods of administering such immunogenic compositions or vaccines. In some forms, a plurality of ASFV antigens are combined together into a live-vectored multivalent immunogenic composition. In some forms, the live-vectored multivalent immunogenic composition is a multicistronic expression cassette.

### GOVERNMENT LICENSE RIGHTS

[0001] This invention was made with government support under USDA-NIFA 2016-67015-25041 awarded by United States Department of Agriculture. The government has certain rights in the invention.

### SEQUENCE LISTING

[0002] This application contains a sequence listing in paper format and in computer readable format, the teachings and content of which are hereby incorporated by reference.

### BACKGROUND

[0003] African Swine Fever Virus (“ASFV”) is a highly contagious hemorrhagic disease of pigs that resembles classical swine fever in its presentation of clinical signs and lesions. ASFV is enzootic in many African countries as well as in Sardinia. Beginning in 2007, ASFV spread into domestic and wild pig populations in western and southern Russia. This spread has continued into Europe and threatens pig populations throughout the continent.

[0004] ASFV is a large, enveloped, double-stranded DNA virus that replicates primarily in cells of the mononuclear phagocytic system. It is a member of the Asfarviridae family. Genotypes of ASFV are differentiated by sequence analysis of the genomes of viruses obtained from different geographic areas. The virus is highly resistant to a wide pH range and to a freeze/thaw cycle and can remain infectious for many months at room temperature or when stored at 4 degrees C. Virus in body fluids and serum is inactivated in 30 min at 60 degrees C., but virus in unprocessed pig meat can be inactivated by heating to 70 degrees for 30 minutes. Although ASFV can be adapted to grow in cells from different species, it does not replicate readily in any species other than swine.

[0005] Peracute, acute, subacute, and chronic forms of ASFV occur and mortality rates vary from 0 to 100%. Acute disease is characterized by a short incubation period of 3-7 days, followed by high fever (up to 42 degrees C.) and death in 5-10 days. Clinical signs include loss of appetite; depression; recumbancy; hyperemia of the skin of the ears, abdomen, and legs; respiratory distress; vomiting; bleeding from the nose or rectum; diarrhea; and abortion. Lesions are evidenced in the lymph nodes, kidneys, heart, as well as other organs. Some isolates produce an enlarged and friable spleen; straw-colored or blood-stained fluid in pleural, pericardial, and peritoneal cavities; or edema and congestion of the lungs. Chronic disease is characterized by emaciation, swollen joints, and respiratory problems. Because ASFV cannot be distinguished from classical swine fever by either clinical or postmortem examination, infection must be confirmed by PCR, ELISA, or indirect immunofluorescence.

[0006] There is no treatment or prophylactic for ASFV. Successful eradication involves the slaughter and disposal of all animals on the premises.

[0007] What is needed is a composition and accompanying methods of making and administering the composition that reduces the severity of or incidence of clinical and postmortem signs of ASFV infection.

### SUMMARY OF THE DISCLOSURE

[0008] The present disclosure overcomes the problems inherent in the art and provides immunogenic compositions or vaccines against ASFV, methods of making and using such immunogenic compositions or vaccines, and methods of administering such immunogenic compositions or vaccines.

[0009] In one aspect, the present disclosure generally provides an efficacious African Swine Fever Virus (ASFV) immunogenic composition or vaccine.

[0010] In another aspect, the present disclosure generally provides methods for making and/or producing an efficacious African Swine Fever Virus immunogenic composition or vaccine.

[0011] In another aspect, the present disclosure generally provides an immunogenic composition or vaccine that reduces the severity of or the incidence of infection by ASFV.

[0012] In another aspect, the present disclosure generally provides methods for reducing the incidence and/or severity of clinical and postmortem signs of ASFV infection.

[0013] In another aspect, the present disclosure generally provides a compatible DIVA Lateral Flow Device (LFD) for rapid diagnosis.

[0014] In some forms of all aspects, the immunogenic composition comprises at least one ASFV antigen. Preferably, the antigen is conserved among ASFV isolates. One preferred source for conserved antigens is from the Georgia 2007/1 ASFV isolate. In preferred forms, a plurality of antigens are combined together into a live-vectored multivalent immunogenic composition. In some forms, the live-vectored multivalent immunogenic composition is a multicistronic expression cassette. In some forms, the multicistronic expression cassette includes 1, 2, 3, 4, 5, 6, 7, 8, 9, 10, 11, 12, 13, 14, 15, 16, 17, 18, 19, 20, or more individual antigens. In some forms, the multicistronic cassette includes an insert of at least 1 kBp, 2 kBp, 3 kBp, 4 kBp, 5 kBp, 6 kBp, 7 kBp, or 8 kBp. Some preferred antigens are selected from the group consisting of sequences having at least 80%, more preferably 85%, still more preferably 90%, even more preferably 91%, 92%, 93%, 94%, 95%, 96%, 97%, 98%, 99%, or 100% sequence identity or sequence homology with a sequence selected from SEQ ID NOS. 1-101. Any one or number of SEQ ID NOS. 1-101 can be combined together to form a multicistronic expression cassette. In other words, the individual sequences can be combined together in any order and with any number of individual sequences being combined. Some preferred multicistronic expression cassettes are provided as SEQ ID NOS. 102-131. As can be appreciated, the antigens forming each expression cassette can vary in their sequence identity to the individual sequences as described above, therefore, the overall sequence identity or homology required for an expression cassette is at least 80%, more preferably 85%, still more preferably 90%, even more preferably 91%, 92%, 93%, 94%, 95%, 96%, 97%, 98%, 99%, or 100% with a sequence selected from SEQ ID NOS. 102-131. Further, the individual sequences forming a multicistronic expression cassette can appear in any order. For example, SEQ ID NO. 104 includes the antigens from SEQ ID NOS. 2, 3, and 4. In SEQ ID NO. 104, these appear in numerical order 2, 3, and 4, respectively. However, they can be in any order such as 4, 3, and 2; or 3, 2, and 4, or 2, 4, and 3. In some forms, the individual sequences are fused or included in-frame to create a chimeric antigenic sequence. In some forms, a self-cleaving peptide linker is included between the different antigens forming the multivalent composition.

[0015] In some forms of a live-vectored multivalent immunogenic composition of the disclosure, the multicistronic expression cassette utilizes a replication incompetent vector, such as a recombinant adenovirus. In other forms, the multicistronic expression cassette utilizes a single cycle replicon virus, preferably a single cycle replicon adenovirus, as the vector. In still other forms, the multicistronic cassette utilizes an attenuated bovine parainfluenza virus type 3 genotype c (BPIV3c) as the vector. In addition to inducing strong cytotoxic T lymphocyte (CTL) immune responses, compositions of the disclosure generate IFN-γ and antibody responses. In still other forms, a baculovirus or lentivirus vector is utilized.

[0016] In another aspect, the present disclosure generally provides nucleic acid sequences for expressing any of SEQ ID NOS. 1-131 or sequences having at least 80%, more preferably 85%, still more preferably 90%, even more preferably 91%, 92%, 93%, 94%, 95%, 96%, 97%, 98%, 99%, or 100% sequence identity or homology with any of SEQ ID NOS. 1-131. Such nucleic acid sequences can be placed in a vector for expression wherein the resultant construct is administered to a subject as described in this disclosure or the expressed antigens are recovered and used in accordance with methods of this disclosure or administered in accordance with methods of this disclosure.

[0017] In another aspect of the present disclosure, a fragment of a nucleic acid sequence or expressed antigen is provided. In preferred forms, the fragments comprise a portion of any of SEQ ID NOS. 1-131, or the proteins expressed therefrom. In preferred forms, a nucleic acid fragment of any one or more of SEQ ID NOS. 1-131 includes at least 15, 21, 30, 45, 60, 75, 99, 120, 150, or 180 consecutive nucleotides of the specific sequence from SEQ ID NOS. 1-131 or sequences having at least 80%, more preferably 85%, still more preferably 90%, even more preferably 91%, 92%, 93%, 94%, 95%, 96%, 97%, 98%, 99%, or 100% sequence identity or homology with any of SEQ ID NOS. 1-131. Similarly, a fragment of an antigen expressed by any one of SEQ ID NOS. 1-131 or at least 80%, more preferably 85%, still more preferably 90%, even more preferably 91%, 92%, 93%, 94%, 95%, 96%, 97%, 98%, 99%, or 100% sequence identity or homology with any of SEQ ID NOS. 1-131 will preferably include at least 5, 7, 10, 15, 20, 25, 33, 40, 50, or 60 consecutive amino acids from the specific expressed sequence.

[0018] Knowledge gleaned from previous and ongoing ASFV vaccine studies suggests that an efficacious subunit vaccine will preferably include a system capable of cytosolic antigen expression and amplification for effective priming and expansion of cytotoxic T lymphocytes (CTLs) which are required to eliminate infected cells. In some forms, a preferred system includes a replicon system. To this end, we have identified and validated promising conserved ASFV (Georgia 2007/1) CTL antigens and used the genes encoding these antigens to develop a prototype immunogenic composition or vaccine, designated SC-Ad-ASFV, composed of next generation single-cycle replicon adenovirus (SC-Ad) encoding multicistronic expression cassettes that incorporate conserved African Swine Fever Virus (ASFV) antigens. The ASFV Georgia 2007/1 isolate was selected because it is highly virulent and epidemiologically relevant. A chimeric antigen, designated KP1712, was also generated for development of a compatible DIVA lateral flow-based highly sensitive diagnostic tool.

[0019] The composition according to the disclosure may be administered or applied systemically through an intravenous, intravascular, intramuscular, intranasal, intraarterial, intraperitoneal, oral, subcutaneous, transdermal, or intrathecal route. Preferably, the composition is administered or applied orally or intramuscularly. For an oral administration, an edible bait is most preferred as this will also permit immunization of pigs, wild boars, and feral pigs. Depending on the desired duration and effectiveness of the treatment, the compositions according to the disclosure may be administered once or several times, also intermittently, for instance on a daily basis for several days, weeks or months, and in different dosages.

[0020] Selection of Novel Vaccine Candidate Antigens

[0021] Since peptide presentation by Swine Leukocyte Antigen I (SLA I) is required to prime and expand CTLs, a strategy that utilizes an algorithm based on SLA I-peptide binding is expected to identify putative candidate antigens based on the presence of peptide motifs predicted to bind with high affinity to defined SLA I molecules. All the conserved ASFV (Georgia 2007/1) open-reading frames (ORFs) were screened for the presence of peptide motifs that bind strongly to 75 defined SLA I alleles and identified novel targets containing putative CTL epitopes (found on the web at cbs.dtu.dk/services/NetMHCpan/). The targets were ranked based on the number of putative CTL epitopes and binding affinity (FIG. 1). The targets were validated using ASFV convalescent serum followed by in vitro confirmation of the SLA class I-binding motifs using peptides (FIGS. 2 and 3).

[0022] One hundred ORFs were selected (see list below) and used to design multicistronic expression cassettes separated by an efficient self-cleaving 2A peptide linker (FIG. 2). The multicistronic expression cassettes were modified to add, in-frame, a HA-tag at the N-termini and a FLAG-tag at the C-termini (FIG. 2A). The amino acid sequences of the multicistronic cassettes were used to design synthetic genes codon-optimized for protein expression in swine cells. Recombinant DNA and SC-Ad expression constructs were generated using the synthetic genes (FIG. 2B). Protein expression by the constructs was evaluated by immunocytometric analysis using anti-HA and anti-FLAG monoclonal antibodies (mAbs), and ASFV-specific convalescent serum was used to validate authenticity of the expressed antigens (FIG. 2B). Auto-cleavage of the 2A peptide linker is verifiable using Western blot probed with anti-tag mAbs. Peptides were used to validate the predicted SLA I binding motifs (FIG. 3).

[0023] In some forms of the present disclosure, at least one ASFV nucleic acid sequence encoding at least one of SEQ ID NOS. 1-101 is inserted into an appropriate vector for administration to a subject. After administration to the subject, the recombinant construct expresses at least one sequence in vivo. In preferred forms, more than one ASFV nucleic acid sequence is included in a multicistronic cassette and the entire cassette is inserted into the vector for administration and in vivo expression. In some forms, the cassette includes 1, 2, 3, 4, 5, 6, 7, or more DNA sequences encoding 1, 2, 3, 4, 5, 6, 7, or more of SEQ ID NOS. 1-101. In some forms, the cassette is inserted into a conventional vector. In some forms, the cassette is an adenovirus, baculovirus, or lentivirus vector. In some forms, the vector is replication incompetent. In some forms, the vector is a single-cycle replicon adenovirus. In some forms, the vector is an attenuated bovine parainfluenza virus type 3 genotype c (BPIV3c).

[0024] The preferred methods of the present disclosure will begin with synthesis of chimeric genes encoding multiple ASFV antigens codon-optimized for protein expression in swine cells. Some preferred sequences are selected from the group consisting of nucleotide sequences that encode SEQ ID NOS. 1-101 or sequences having at least 80%, more preferably 85%, still more preferably 90%, even more preferably 91%, 92%, 93%, 94%, 95%, 96%, 97%, 98%, 99%, or 100% sequence identity or sequence homology to SEQ ID NOS. 1-101. One or more nucleotide sequences encoding one or more than one of SEQ ID NOS. 1-101 can be synthesized and cloned into a plasmid vector. The resultant construct(s) is used to generate recombinant viral expression construct(s). Protein expression by the constructs was evaluated by immunocytometric analysis using anti-HA and anti-FLAG monoclonal antibodies (mAbs), and ASFV-specific convalescent serum was used to validate authenticity of the expressed antigens (FIG. 2B). The multicistronic expression cassettes were formed using the constructs and modified to add, in-frame, a HA-tag at the N-termini and a FLAG-tag at the C-termini (FIG. 2A). The amino acid sequences of the multicistronic cassettes were used to design synthetic genes codon-optimized for protein expression in swine cells. Recombinant DNA and SC-Ad expression constructs were generated using the synthetic genes (FIG. 2B).

[0025] In some forms, the methods of the present disclosure will begin with the isolation of ASFV DNA. Any ASFV sequence can be used for purposes of the present disclosure. Some preferred sequences are selected from the group consisting of nucleotide sequences that encode SEQ ID NOS. 1-101 or sequences having at least 80%, more preferably 85%, still more preferably 90%, even more preferably 91%, 92%, 93%, 94%, 95%, 96%, 97%, 98%, 99%, or 100% sequence identity or sequence homology to SEQ ID NOS. 1-101. One or more nucleotide sequences encoding one or more than one of SEQ ID NOS. 1-101 can be isolated and cloned into the vector. In some forms, the ASFV DNA is preferably amplified using PCR methods. The resulting DNA is then cloned into the transfer vector.

[0026] In one aspect of the present disclosure, a method for generating a recombinant viral construct containing ASFV DNA is provided. This method generally comprises the steps of: 1) cloning at least one recombinant ASFV DNA sequence into a transfer vector; and 2) shuttling the portion of the transfer construct containing the recombinant ASFV sequence into a viral vector, to generate the recombinant viral construct. As noted above, some preferred ASFV nucleotide or DNA sequences encode protein sequences having at least 80%, more preferably 85%, still more preferably 90%, even more preferably 91%, 92%, 93%, 94%, 95%, 96%, 97%, 98%, 99%, or 100% sequence identity or sequence homology to SEQ ID NOS. 1-101.

[0027] According to a further aspect, the ASFV DNA can be amplified prior to step 1) in vitro. In vitro methods for amplifying the ASFV DNA and cloning in vitro amplified ASFV DNA into a transfer vector and suitable transfer vectors are described above or known to a person skilled in the art. Thus according to a further aspect, the present disclosure relates to a method for generating a recombinant viral construct containing ASFV DNA and expressing at least one desired ASFV protein comprising the steps of: 1) Synthesis of codon-optimized gene or amplifying ASFV DNA in vitro, 2) cloning the ASFV DNA into a transfer vector; and 3) shuttling a portion thereof containing the recombinant ASFV DNA into a viral vector to generate the recombinant viral construct. In some forms, the ASFV DNA sequences encode protein sequences having at least 80%, more preferably 85%, still more preferably 90%, even more preferably 91%, 92%, 93%, 94%, 95%, 96%, 97%, 98%, 99%, or 100% sequence identity or sequence homology to at least one sequence of SEQ ID NOS. 1-101. In some forms, the recombinant construct is administered for in vivo protein expression and in other forms, the protein(s) is expressed, recovered, and administered to the subject.

[0028] In another aspect of the present disclosure, a method for preparing a composition, preferably an immunogenic composition, such as a vaccine, for invoking an immune response against ASFV is provided. Generally, this method includes the steps of generating a viral expression construct, wherein the construct comprises 1) recombinant DNA from at least one DNA sequence of ASFV that encodes at least one desired antigen, 2) infecting cells in growth media with the recombinant virus, 3) causing the virus to express the recombinant protein from ASFV, 4) recovering the expressed recombinant protein, 5) and, in some forms, preparing the composition by combining the recovered protein with a suitable adjuvant and/or other pharmaceutically acceptable carrier. It is understood that adjuvants are not required to practice the methods nor to combine with the antigens of the disclosure in compositions. In some preferred forms, the composition also includes at least a portion of the viral construct expressing said ASFV protein, and/or a portion of the cell culture supernate.

[0029] In another aspect of the present disclosure, a method for preparing an immunogenic composition, such as a vaccine, for invoking an immune response against ASFV comprises the steps of 1) expressing and recovering ASFV protein, and 2) admixing the recovered protein with a suitable pharmaceutical-acceptable or veterinary-acceptable carrier. As used herein, “a pharmaceutical-acceptable carrier” or “veterinary-acceptable carrier” includes any and all solvents, dispersion media, coatings, stabilizing agents, diluents, preservatives, antibacterial and antifungal agents, isotonic agents, adsorption delaying agents, and the like. In one preferred form, the composition provided herewith, contains ASFV protein recovered from in vitro cultured cells, wherein said cells were infected with a recombinant viral construct containing ASFV DNA and expressing ASFV protein, and wherein the cell culture was treated to inactivate the viral construct, and an equivalent concentration of a neutralization agent was added, and wherein both an adjuvant and physiological saline are also added. As with the other aspects, the ASFV protein preferably has at least 80%, more preferably 85%, still more preferably 90%, even more preferably 91%, 92%, 93%, 94%, 95%, 96%, 97%, 98%, 99%, or 100% sequence identity or sequence homology to SEQ ID NOS. 1-101. When included, the amount of physiological saline is preferably about 50 to about 90% (v/v), more preferably about 60 to 80% (v/v), still more preferably about 70% (v/v). Optionally, this method can also include the addition of a protectant. A protectant as used herein, refers to an anti-microbiological active agent, such as for example Gentamycin, Merthiolate, and the like. In particular adding a protectant is most preferred for the preparation of a multi-dose composition. Those anti-microbiological active agents are added in concentrations effective to prevent the composition of interest from any microbiological contamination or for inhibition of any microbiological growth within the composition of interest.

[0030] The methods of the present disclosure can also comprise the addition of any stabilizing agent, such as for example saccharides, trehalose, mannitol, saccharose and the like, to increase and/or maintain product shelf-life and/or to enhance stability.

[0031] In another aspect of the present disclosure, products resulting from the methods as described above are provided. In particular, the present disclosure relates to a composition of matter comprising a construct having therein at least one ASFV nucleic acid sequence. In some forms, the ASFV nucleic acid sequence(s) encodes a protein having at least 80%, more preferably 85%, still more preferably 90%, even more preferably 91%, 92%, 93%, 94%, 95%, 96%, 97%, 98%, 99%, or 100% sequence identity or sequence homology to SEQ ID NOS. 1-101. In some forms, the vector is a live vector. In some forms, the vector is a replication incompetent vector, such as a recombinant adenovirus. In other forms, the multicistronic expression cassette utilizes a single cycle replicon virus, preferably a single cycle replicon adenovirus, as the vector. In still other forms, the multicistronic cassette utilizes an attenuated bovine parainfluenza virus type 3 genotype c (BPIV3c) as the vector. In some forms, the vector including the ASFV nucleic acid sequence(s) is administered to a subject as described herein. In other forms, the vector expresses the nucleic acid sequences in vitro and the resulting recombinant ASFV polypeptides or proteins are recovered and administered to a subject as described in this disclosure. Of course, it is understood that the ASFV polypeptide used in an immunogenic composition in accordance with the present disclosure can be derived in any fashion including isolation and purification, standard protein synthesis, and recombinant methodology.

[0032] In a further aspect of the present disclosure, an immunogenic composition effective for lessening the severity of clinical symptoms associated with ASFV infection comprising at least one ASFV nucleic acid is provided. Preferably, the ASFV nucleic acid encodes 1) any polypeptide that is at least 80%, more preferably 85%, still more preferably 90%, even more preferably 91%, 92%, 93%, 94%, 95%, 96%, 97%, 98%, 99%, or 100% homologous to the polypeptide of any one of SEQ ID NOS: 1-101, or any combination thereof; 2) any immunogenic portion of the polypeptides of 1); and, 3) a polypeptide equivalent to (due to the degeneracy of the genetic code) one encoded by a DNA comprising the sequence of SEQ ID NOS: 1-101. As noted above, it is particularly preferred to have multiple sequences encoding any one of SEQ ID NOS: 1-101 included in the immunogenic composition and even more preferred to have them combined together in a multicistronic expression cassette.

[0033] According to a further aspect, at least one ASFV protein is provided in the immunological composition at an antigen inclusion level effective for inducing the desired immune response, namely reducing the incidence of or lessening the severity of clinical signs resulting from ASFV infection. Preferably, the ASFV protein inclusion level is at least 25 μg antigen/ml of the final immunogenic composition (μg/ml), more preferably from about 25 to about 400 μg/ml.

[0034] The at least one nucleotide sequence, polypeptide, or polypeptide encoded by the multicistronic expression cassette is incorporated into a composition that can be administered to an animal susceptible to ASFV infection. In preferred forms, the composition may also include additional components known to those of skill in the art (see also Remington's Pharmaceutical Sciences. (1990). 18th ed. Mack Publ., Easton).

[0035] Those of skill in the art will understand that the composition herein may incorporate known injectable, physiologically acceptable, sterile solutions. For preparing a ready-to-use solution for parenteral injection or infusion, aqueous isotonic solutions, such as e.g. saline or corresponding plasma protein solutions are readily available. In addition, the immunogenic and vaccine compositions of the present disclosure can include diluents, isotonic agents, stabilizers, or adjuvants. Diluents can include water, saline, dextrose, ethanol, glycerol, and the like. Isotonic agents can include sodium chloride, dextrose, mannitol, sorbitol, and lactose, among others. Stabilizers include albumin and alkali salts of ethylenediaminetetraacetic acid, among others. Suitable adjuvants are those described above. Oral forms of the composition are also envisioned and in some forms, preferred.

[0036] The immunogenic compositions described herein can further include one or more other immunomodulatory agents such as, e. g., interleukins, interferons, or other cytokines. The immunogenic compositions can also include Gentamicin. In another preferred embodiment, the present disclosure contemplates vaccine compositions comprising from about 1 ug/ml to about 60 μg/ml of antibiotics, and more preferably less than about 30 μg/ml of antibiotics.

[0037] It will be found that the immunogenic compositions comprising live-vectored multivalent immunogenic compositions as provided herewith are very effective in reducing the severity of or incidence of clinical signs associated with ASFV infections up to and including the prevention of such signs.

[0038] Another aspect of the present disclosure relates to a kit. Generally the kit includes a container comprising at least one dose of the live-vectored multivalent immunogenic composition of ASFV nucleotide sequences as provided in this disclosure.

[0039] In another aspect of the present disclosure, a kit is provided. Generally, the kit includes a container comprising at least one does of at least one ASFV recombinant protein as described herein. In some forms, one dose comprises at least 2 μg ASFV protein. Said container can comprise from 1 to 250 doses of the immunogenic composition. In some preferred forms, the container contains 1, 10, 25, 50, 100, 150, 200, or 250 doses of the immunogenic composition of ASFV protein. Preferably, each of the containers comprising more than one dose of the immunogenic composition of ASFV protein further comprises an anti-microbiological active agent. Those agents are for example, antibiotics including Gentamicin and the like. Thus, one aspect of the present disclosure relates to a container that comprises from 1 to 250 doses of the immunogenic composition of ASFV protein, wherein one dose comprises at least 2 μg ASFV protein, and Gentamicin, preferably from about 1 μg/ml to about 60 μg/ml of antibiotics, and more preferably less than about 30 μg/ml. In preferred forms, the kit also includes an instruction manual, including the information for the administration of at least one dose of the immunogenic composition of ASFV protein into animals, preferably pigs and piglets to lessen the incidence and/or severity of clinical symptoms associated with ASFV infection. Moreover, according to a further aspect, said instruction manual comprises the information of a second or further administration(s) of at least one dose of the immunogenic composition of ASFV, wherein the second administration or any further administration is at least 14 days beyond the initial or any former administration. In some preferred forms, said instruction manual also includes the information, to administer an immune stimulant. Preferably, said immune stimulant shall be given at least twice. Preferably, at least 14, more preferably at least 21, and even more preferably at least 28 days are between the first and the second or any further administration of the immune stimulant. Preferably, the immune stimulant is given at least 10 days, preferably 15, even more preferably 20, and still even more preferably at least 22 days beyond the initial administration of the immunogenic composition of ASFV protein. It is understood that any immune stimulant known to a person skilled in the art can also be used. “Immune stimulant” as used herein, means any agent or composition that can trigger a general immune response, preferably without initiating or increasing a specific immune response, for example the immune response against a specific pathogen. It is further instructed to administer the immune stimulant in a suitable dose. The kit may also comprise a second container, including at least one dose of the immune stimulant.

[0040] A further aspect of the present disclosure relates to the kits as described above, comprising the immunogenic composition of ASFV as provided herewith and the instruction manual, wherein the instruction manual further includes the information to administer the ASFV immunogenic composition together, or around the same time as, with an immunogenic composition that comprises an additional antigen effective for reducing the severity of or incidence of clinical signs related to another porcine pathogen. Preferably, the manual contains the information of when the ASFV-containing composition and the immunogenic composition that comprises an additional antigen are administered.

[0041] A further aspect, relates to the use of any of the compositions provided herewith as a medicament, preferably as a veterinary medicament, even more preferably as a vaccine. Moreover, the present disclosure also relates to the use of any of the compositions described herein, for the preparation of a medicament for lessening the severity of clinical symptoms associated with ASFV infection. Preferably, the medicament is for the prevention of ASFV infection in swine, even more preferably in piglets.

[0042] A further aspect relates to a method for (1) the prevention of an infection, or re-infection with ASFV or (2) the reduction in incidence or severity of or elimination of clinical symptoms caused by ASFV in a subject, comprising administering any of the immunogenic compositions provided herewith to a subject in need thereof. In some forms, the subject is a mammal, such as a pig. It is understood that the reduction is in comparison to a subject that has not received an administration of a composition of the present disclosure. Preferably, one dose or two doses of the immunogenic composition is/are administered. A further aspect relates to the method of treatment as described above, wherein a second application or administration of the immunogenic composition is administered. Preferably, the second administration is done with the same immunogenic composition, preferably having the same amount of ASFV antigen (protein or live-vectored nucleic acid). Preferably, the second administration is done at least 14 days beyond the initial administration, even more preferably at least 4 weeks beyond the initial administration. In preferred forms, the method is effective after just a single dose of the immunogenic composition and does not require a second or subsequent administration in order to confer the protective benefits upon the subject.

[0043] According to a further aspect, the present disclosure provides a multivalent combination vaccine which includes an immunological agent effective for reducing the incidence of or lessening the severity of ASFV infection, and at least one immunological active component against another disease-causing organism in swine.

[0044] In particular the immunological agent effective for reducing the incidence of or lessening the severity of ASFV infection is an ASFV antigen or protein as described herein. Preferably, said ASFV antigen encodes protein having, or is a protein that has at least 80%, more preferably 85%, still more preferably 90%, even more preferably 91%, 92%, 93%, 94%, 95%, 96%, 97%, 98%, 99%, or 100% sequence homology with any one of SEQ ID NOS: 1-101 and any combination thereof as provided herewith.

[0045] Preferably the other disease-causing organism in swine is selected from the group consisting of: Actinobacillus pleuropneumonia; Adenovirus; Alphavirus such as Eastern equine encephalomyelitis viruses; Bordetella bronchiseptica; Brachyspira spp., preferably B. hyodyentheriae; B. piosicoli, Brucella suis, preferably biovars 1, 2, and 3; Classical swine fever virus; Clostridium spp., preferably Cl. difficile, Cl. perfringens types A, B, and C, Cl. novyi, Cl. septicum, Cl. tetani; Coronavirus, preferably Porcine Respiratory Corona virus; Eperythrozoonosis suis; Erysipelothrix rhsiopathiae; Escherichia coli; Haemophilus parasuis, preferably subtypes 1, 7 and 14: Hemagglutinating encephalomyelitis virus; Japanese Encephalitis Virus; Lawsonia intracellularis; Leptospira spp.; preferably Leptospira australis; Leptospira canicola; Leptospira grippotyphosa; Leptospira icterohaemorrhagicae; and Leptospira interrogans; Leptospira pomona; Leptospira tarassovi; Mycobacterium spp. preferably M. avium; M. intracellulare; and M. bovis; Mycoplasma hyopneumoniae (M hyo); Pasteurella multocida; Porcine circovirus; Porcine cytomegalovirus; Porcine Parvovirus; Porcine Reproductive and Respiratory Syndrome (PRRS) Virus; Pseudorabies virus; Rotavirus; Salmonella spp.; preferably S. thyhimurium; and S. choleraesuis; Staph. hyicus; Staphylococcus spp. preferably Streptococcus spp., preferably Strep. suis; Swine herpes virus; Swine Influenza Virus; Swine pox virus; Swine pox virus; Vesicular stomatitis virus; Virus of vesicular exanthema of swine; Leptospira hardjo; and/or Mycoplasma hyosynoviae.

[0046] Nucleotide, polynucleotide or nucleic acid sequence will be understood according to the present disclosure as meaning both a double-stranded or single-stranded DNA in the monomeric and dimeric (so-called in tandem) forms and the transcription products of said DNAs.

[0047] It must be understood that the present disclosure does not relate to the genomic nucleotide sequences taken in their natural environment, that is to say in the natural state. It concerns sequences which it has been possible to isolate, purify or partially purify, starting from separation methods such as, for example, ion-exchange chromatography, by exclusion based on molecular size, or by affinity, or alternatively fractionation techniques based on solubility in different solvents, or starting from methods of genetic engineering such as amplification, cloning and subcloning, it being possible for the sequences of the disclosure to be carried by vectors.

[0048] Among said nucleotide sequences according to the disclosure, those coding for polypeptides, such as, for example, the sequences SEQ ID NOS. 1-101 and any combination thereof. The nucleotide sequence fragments according to the disclosure can be obtained, for example, by specific amplification, such as PCR, or after digestion with appropriate restriction enzymes of nucleotide sequences according to the disclosure, these methods in particular being described in the work of Sambrook et al., 1989. Said representative fragments can likewise be obtained by chemical synthesis when their size is not very large and according to methods well known to persons skilled in the art.

[0049] Modified nucleotide sequence will be understood as meaning any nucleotide sequence obtained by mutagenesis according to techniques well known to the person skilled in the art, and containing modifications with respect to the normal sequences according to the disclosure, for example mutations in the regulatory and/or promoter sequences of polypeptide expression, especially leading to a modification of the rate of expression of said polypeptide or to a modulation of the replicative cycle.

[0050] In the present description, the terms polypeptide, peptide and protein are interchangeable.

[0051] It must be understood that the disclosure does not relate to the polypeptides in natural form, that is to say that they are not taken in their natural environment but that they can be isolated or obtained by purification from natural sources, or else obtained by genetic recombination, or alternatively by chemical synthesis and that they can thus contain unnatural amino acids.

[0052] Polypeptide fragment according to the disclosure is understood as designating a polypeptide containing at least 5 consecutive amino acids, preferably 10 consecutive amino acids or 15 consecutive amino acids.

[0053] The nucleotide sequences coding for a polypeptide according to the disclosure are likewise part of the disclosure.

[0054] The disclosure likewise relates to nucleotide sequences utilizable as a primer or probe, characterized in that said sequences are selected from the nucleotide sequences according to the disclosure.

[0055] Another subject of the present disclosure is a vector for the cloning and/or expression of a sequence, characterized in that it contains a nucleotide sequence according to the disclosure.

[0056] The vectors according to the disclosure, characterized in that they contain the elements allowing the expression and/or the secretion of said nucleotide sequences in a determined host cell, are likewise part of the disclosure. The vector must then contain a promoter, signals of initiation and termination of translation, as well as appropriate regions of regulation of transcription. It must be able to be maintained stably in the host cell and can optionally have particular signals specifying the secretion of the translated protein. These different elements are chosen as a function of the host cell used. To this end, the nucleotide sequences according to the disclosure can be inserted into autonomous replication vectors within the chosen host, or integrated vectors of the chosen host. Such vectors will be prepared according to the methods currently used by the person skilled in the art, and it will be possible to introduce the clones resulting therefrom into an appropriate host by standard methods, such as, for example, oral administration, injection, lipofection, transdermal administration, electroporation and thermal shock. The vectors according to the disclosure are, for example, vectors of plasmid or viral origin. Preferred vectors for the expression of polypeptides of the disclosure include a single-cycle replicon adenovirus or an attenuated bovine parainfluenza virus type 3 genotype 3C (BPIV3C).

[0057] Advantageously, the antigenic determinant is such that it is capable of inducing a humoral and/or cellular response. It will be possible for such a determinant to comprise a polypeptide according to the disclosure in glycosylated form used with a view to obtaining immunogenic compositions capable of inducing the synthesis of antibodies directed against multiple epitopes. Said polypeptides or their glycosylated fragments are likewise part of the disclosure. These hybrid molecules can be formed, in part, of a polypeptide carrier molecule or of fragments thereof according to the disclosure, associated with a possibly immunogenic part, in particular an epitope of the diphtheria toxin, the tetanus toxin, a surface antigen of the hepatitis B virus (patent FR 79 21811), the VP1 antigen of the poliomyelitis virus or any other viral or bacterial toxin or antigen. The procedures for synthesis of hybrid molecules encompass the methods used in genetic engineering for constructing hybrid nucleotide sequences coding for the polypeptide sequences sought. It will be possible, for example, to refer advantageously to the technique for obtainment of genes coding for fusion proteins described by Minton in 1984. Said hybrid nucleotide sequences coding for a hybrid polypeptide as well as the hybrid polypeptides according to the disclosure characterized in that they are recombinant polypeptides obtained by the expression of said hybrid nucleotide sequences are likewise part of the disclosure.

[0058] The disclosure likewise comprises the vectors characterized in that they contain one of said hybrid nucleotide sequences. The host cells transformed by said vectors, the transgenic animals comprising one of said transformed cells as well as the procedures for preparation of recombinant polypeptides using said vectors, said transformed cells and/or said transgenic animals are, of course, likewise part of the disclosure.

[0059] The disclosure likewise relates to a pharmaceutical composition comprising a compound selected from the following compounds: a) a nucleotide sequence according to the disclosure; b) a polypeptide according to the disclosure; c) a vector, a viral particle or a cell transformed according to the disclosure; d) an antibody according to the disclosure; and e) a compound capable of being selected by a selection method according to the disclosure; possibly in combination with a pharmaceutically acceptable carrier and, if need be, with one or more adjuvants of the appropriate immunity.

[0060] The disclosure also relates to an immunogenic and/or vaccine composition, characterized in that it comprises a compound selected from the following compounds: a) a nucleotide sequence according to the disclosure; b) a polypeptide according to the disclosure; c) a vector or a viral particle according to the disclosure; and d) a cell according to the disclosure.

[0061] In one embodiment, the vaccine composition according to the disclosure is characterized in that it comprises a mixture of at least two of said compounds a), b), c) and d) above and in that one of the two said compounds is related to the ASFV.

[0062] In another embodiment of the disclosure, the vaccine composition is characterized in that it comprises at least one compound a), b), c), or d) above which is related to ASFV.

[0063] A compound related to the ASFV is understood here as respectively designating a compound obtained from the genomic sequence of the ASFV. Preferably the compound will be selected from the group consisting of at least one nucleic acid sequence encoding for a sequence having at least 80%, more preferably 85%, still more preferably 90%, even more preferably 91%, 92%, 93%, 94%, 95%, 96%, 97%, 98%, 99%, or 100% sequence homology with any one or more of SEQ ID NOS: 1-101, and any combination thereof, a polypeptide sequence having at least 80%, more preferably 85%, still more preferably 90%, even more preferably 91%, 92%, 93%, 94%, 95%, 96%, 97%, 98%, 99%, or 100% sequence homology with any one or more of SEQ ID NOS: 1-101, and any combination thereof, and any combination of at least one nucleic acid sequence and at least one polypeptide sequence, as described herein.

[0064] The disclosure is additionally aimed at an immunogenic and/or vaccine composition, characterized in that it comprises at least one of the following compounds: 1) a nucleotide sequence encoding any one of SEQ ID NOS. 1-101 or one of their fragments or homologues; 2) a polypeptide selected from the group consisting of SEQ ID NOS. 1-101; 3) a vector or a viral particle comprising a nucleotide sequence of 1); 4) a transformed cell capable of expressing a polypeptide of 2); or 5) a mixture of at least two of said compounds.

[0065] The disclosure also comprises an immunogenic and/or vaccine composition according to the disclosure, characterized in that it comprises said mixture of at least two of said compounds as a combination product for simultaneous, separate or protracted use for the prevention or the treatment of infection by ASFV.

[0066] The disclosure is likewise directed at a pharmaceutical composition according to the disclosure, for the prevention or the treatment of an infection by ASFV.

[0067] It is understood that “prevention” as used in the present disclosure, includes the complete prevention of infection by ASFV, but also encompasses a reduction in the severity of or incidence of clinical signs associated with or caused by ASFV infection. Such prevention is also referred to herein as a protective effect.

[0068] The disclosure likewise concerns the use of a composition according to the disclosure, for the preparation of a medicament intended for the prevention or the treatment of infection by ASFV.

[0069] The live-vectored multivalent immunogenic compositions as described herein and the polypeptides of the disclosure entering into the immunogenic or vaccine compositions according to the disclosure can be selected by techniques known to the person skilled in the art such as, for example, depending on the capacity of said polypeptides to stimulate the T cells, which is translated, for example, by their proliferation or the secretion of interleukins, and which leads to the production of antibodies directed against said polypeptides.

[0070] In pigs, as in mice, in which a weight dose of the vaccine composition comparable to the dose used in man is administered, the antibody reaction is tested by taking of the serum followed by a study of the formation of a complex between the antibodies present in the serum and the antigen of the vaccine composition, according to the usual techniques.

[0071] The pharmaceutical compositions according to the disclosure will contain an effective quantity of the compounds of the disclosure, that is to say in sufficient quantity of said compound(s) allowing the desired effect to be obtained, such as, for example, the modulation of the cellular replication of ASFV. The person skilled in the art will know how to determine this quantity, as a function, for example, of the age and of the weight of the individual to be treated, of the state of advancement of the pathology, of the possible secondary effects and by means of a test of evaluation of the effects obtained on a population range, these tests being known in these fields of application.

[0072] According to the disclosure, said vaccine combinations will preferably be combined with a pharmaceutically or veterinary acceptable carrier and, if need be, with one or more adjuvants of the appropriate immunity.

[0073] According to another embodiment of the vaccine composition according to the disclosure, the nucleotide sequence, preferably a DNA, is complexed with DEAE-dextran (Pagano et al., 1967) or with nuclear proteins (Kaneda et al., 1989), with lipids (Felgner et al., 1987) or encapsulated in liposomes (Fraley et al., 1980) or else introduced in the form of a gel facilitating its transfection into the cells (Midoux et al., 1993, Pastore et al., 1994). The polynucleotide or the vector according to the disclosure can also be in suspension in a buffer solution or be combined with liposomes.

[0074] These compounds can be administered by the systemic route, in particular by the intravenous route, by the intramuscular, intradermal or subcutaneous route, or by the oral route. In a more preferred manner, the vaccine composition comprising polypeptides according to the disclosure will be administered by the intramuscular route, through the food or by nebulization only once, or several times, staggered over time.

[0075] Their administration modes, dosages and optimum pharmaceutical forms can be determined according to the criteria generally taken into account in the establishment of a treatment adapted to an animal such as, for example, the age or the weight, the seriousness of its general condition, the tolerance to the treatment and the secondary effects noted. Preferably, the vaccine of the present disclosure is administered in an amount that is protective or provides a protective effect against ASFV infection. In some forms, the composition of the disclosure is administered

[0076] An immunologically effective amount of the vaccines or immunogenic compositions of the present disclosure is administered to a pig in need of protection against clinical signs of ASFV infection. The immunologically effective amount or the immunogenic amount that inoculates the pig can be easily determined or readily titrated by routine testing. An effective amount is one in which a sufficient immunological response to the vaccine is attained to protect the pig exposed to the virus which causes ASFV signs. Preferably, the pig is protected to an extent in which one to all of the adverse physiological symptoms or effects of the viral disease are significantly reduced, ameliorated or totally prevented.

[0077] The vaccine can be administered in a single dose or in repeated doses with single doses being preferred. Single dose vaccines provide protection after a single dose without the need for any booster or subsequent dosages. Protection can include the complete prevention of clinical signs of infection, or a lessening of the severity, duration, or likelihood of the manifestation of one or more clinical signs of infection.

[0078] Desirably, the vaccine is administered to a pig not yet exposed to the ASFV virus.

[0079] When administered as a liquid, the present vaccine may be prepared in the form of an aqueous solution, syrup, an elixir, a tincture and the like. Such formulations are known in the art and are typically prepared by dissolution of the antigen and other typical additives in the appropriate carrier or solvent systems. Suitable carriers or solvents include, but are not limited to, water, saline, ethanol, ethylene glycol, glycerol, etc. Typical additives are, for example, certified dyes, flavors, sweeteners and antimicrobial preservatives such as thimerosal (sodium ethylmercurithiosalicylate). Such solutions may be stabilized, for example, by addition of partially hydrolyzed gelatin, sorbitol or cell culture medium, and may be buffered by conventional methods using reagents known in the art, such as sodium hydrogen phosphate, sodium dihydrogen phosphate, potassium hydrogen phosphate, potassium dihydrogen phosphate, a mixture thereof, and the like.

[0080] Liquid formulations also may include suspensions and emulsions that contain suspending or emulsifying agents in combination with other standard co-formulants. These types of liquid formulations may be prepared by conventional methods. Suspensions, for example, may be prepared using a colloid mill. Emulsions, for example, may be prepared using a homogenizer.

[0081] Parenteral formulations, designed for injection into body fluid systems, require proper isotonicity and pH buffering to the corresponding levels of porcine body fluids. Isotonicity can be appropriately adjusted with sodium chloride and other salts as needed. Suitable solvents, such as ethanol or propylene glycol, can be used to increase the solubility of the ingredients in the formulation and the stability of the liquid preparation. Further additives that can be employed in the present vaccine include, but are not limited to, dextrose, conventional antioxidants and conventional chelating agents such as ethylenediamine tetraacetic acid (EDTA). Parenteral dosage forms must also be sterilized prior to use.

[0082] The following examples demonstrate certain aspects of the present disclosure. However, it is to be understood that these examples are for illustration only and do not purport to be wholly definitive as to conditions and scope of this disclosure. It should be appreciated that when typical reaction conditions (e.g., temperature, reaction times, etc.) have been given, the conditions both above and below the specified ranges can also be used, though generally less conveniently. The examples are conducted at room temperature (about 23° C. to about 28° C.) and at atmospheric pressure. All parts and percentages referred to herein are on a weight basis and all temperatures are expressed in degrees centigrade unless otherwise specified. Further unless noted otherwise, all components of the disclosure are understood to be disclosed to cover “comprising”, “consisting essentially of”, and “consisting of” claim language as those terms are commonly used in patent claims.

[0083] Another aspect of the present disclosure is the preparation of the combination vaccine(s) or immunogenic compositions. Such combinations can be between the different vaccine components described herein. For example, a vaccine of the present disclosure can include both protein portions and DNA portions of ASFV, as described herein, which are administered concurrently or separately. Additionally, the combinations can be between the ASFV vaccine components described herein and antigens of other disease-causing organisms, such as those described above.

[0084] According to the present disclosure, an effective amount of a combination vaccine administered to pigs provides effective immunity or a protective effect against microbiological infections caused by ASFV and at least one further pathogen. Preferred combinations of antigens for the treatment and prophylaxis of microbiological diseases in pigs are listed above.

[0085] According to a further embodiment, the combination vaccine is administered to pigs in one or two doses at an interval of about 2 to 4 weeks. For example, the first administration is performed when the animal is about 2 to 3 weeks to about 8 weeks of age. The second administration is performed about 1 to about 4 weeks after the first administration of the first vaccination. According to a further embodiment, revaccination is performed in an interval of 3 to 12 month after administration of the second dose. Administration of subsequent vaccine doses is preferably done on a 6 month to an annual basis. In another preferred embodiment, animals vaccinated before the age of about 2 to 3 weeks should be revaccinated. Administration of subsequent vaccine doses is preferably done on an annual basis. In the event that one of the components of the combination vaccine is effective after just a single dose, such component needs to only be administered a single time with the other component(s) administered according to their preferred regimen.

### BRIEF DESCRIPTION OF THE DRAWINGS

[0086] The following drawings form part of the present specification and are included to further demonstrate certain aspects of the present disclosure. The disclosure may be better understood by reference to one or more of these drawings in combination with the detailed description of specific embodiments presented herein.

[0087] FIG. 1A is table illustrating the results from ASFV ORF down selection criteria;

[0088] FIG. 1B is flow diagram illustrating the ASFV ORF down selection criteria;

[0089] FIG. 2A is a flow diagram illustrating the design of multicistronic cassettes;

[0090] FIG. 2 B is a set of photographs illustrating the validation of protein expression;

[0091] FIG. 3 is a graph illustrating IFN-γ response to predicted SLA I binding motifs;

[0092] FIG. 4A is graph illustrating RD-Ad primed antibody responses against ASFV antigens p32, p54, pp62, and p′72;

[0093] FIG. 4B is a set of photographs illustrating recognition of ASF virus (Georgia 2007/1) by sera from vaccinees was validated by IFA using ASFV-infected primary porcine macrophages probed with sera from blood collected 1 week post-boost;

[0094] FIG. 5A is a graph illustrating RD-Ad primed IFN-γ responses against ASFV antigen p37 (part of pp220);

[0095] FIG. 5B is a graph illustrating RD-Ad primed IFN-γ responses against ASFV antigen p150 antigen (also part of pp220);

[0096] FIG. 6A is a graph illustrating RD-Ad primed CTL responses to p32, p54, p62, p′72, and FMD [negative control] with the ENABL adjuvant;

[0097] FIG. 6B is a graph illustrating RD-Ad primed CTL responses to p32, p54, p62, p′72, and FMD using the TXO adjuvant;

[0098] FIG. 7A is a graph illustrating survival post-challenge;

[0099] FIG. 7B is a graph illustrating viremia post-challenge;

[0100] FIG. 8A is a dot-blot analysis illustrating protein concentration of 1) p72; 2) p62; 3) p54; 4) p32; and 5) KP1712 chimera at 1:5,000 serum dilution;

[0101] FIG. 8B is a dot-blot analysis illustrating signal detection sensitivity of 4 ng p72, p54, p32, and KP1712 chimera proteins at 1:5,000 serum dilution; and

[0102] FIG. 8C is a dot-blot analysis [using 4 ng protein concentration] illustrating that only KP1712, but not p32, p54, and p72 were detectable at 1:20,000.

### DETAILED DESCRIPTION

[0103] The following detailed description and examples set forth preferred materials and procedures used in accordance with the present disclosure. It is to be understood, however, that this description and these examples are provided by way of illustration only, and nothing therein shall be deemed to be a limitation upon the overall scope of the present disclosure.

[0104] “A”, “an”, and “the” include the singular and plural forms thereof unless the context clearly indicates otherwise.

[0105] “Comprising”, “comprises”, “comprise”, “including”, “includes”, “include”, “having”, “has”, and “with” are all defined as being inclusive of the specified components as well as other unspecified components and can be used interchangeably.

[0106] An “immunogenic or immunological composition” refers to a composition of matter that comprises at least one antigen which elicits an immunological response in the host of a cellular and/or antibody-mediated immune response to the composition or vaccine of interest. Usually, an “immunological response” includes but is not limited to one or more of the following effects: the production or activation of antibodies, B cells, helper T cells, suppressor T cells, and/or cytotoxic T cells and/or γδ T cells, directed specifically to an antigen or antigens included in the composition or vaccine of interest. Preferably, the host will display either a therapeutic or protective immunological response such that resistance to new infection will be enhanced and/or the clinical severity of the disease reduced. Such protection will be demonstrated by either a reduction in the severity or prevalence of, up to and including a lack of symptoms normally displayed by an infected host, a quicker recovery time and/or a lowered viral titer in the infected host.

[0107] The term “transfected into a viral vector” means, and is used as a synonym for “introducing” or “cloning” a heterologous DNA sequence encoding a desired antigen into a viral vector, such as for example into a single-cycle replicon adenovirus, an attenuated bovine parainfluenza virus type 3 genotype c (BPIV3c), or a conventional vector such as a baculovirus vector. A “transfer vector” means a DNA molecule, that includes at least one origin of replication, the heterologous ASFV DNA sequence that encodes a desired antigen, in the present case of ASFV, DNA sequences which allow the cloning of said heterologous ASFV DNA sequence into the viral vector will be included. Preferably the sequences which allow cloning of the heterologous DNA sequence into the viral vector are flanking the heterologous DNA. Even more preferably, those flanking sequences are at least homologous in parts with sequences of the viral vector. The sequence homology then allows recombination of both molecules, the viral vector, and the transfer vector to generate a recombinant viral construct containing the heterologous DNA sequence encoding a desired antigen.

[0108] “Adjuvants” as used herein, can include aluminum hydroxide and aluminum phosphate, saponins e.g., Quil A, QS-21 (Cambridge Biotech Inc., Cambridge Mass.), GPI-0100 (Galenica Pharmaceuticals, Inc., Birmingham, Ala.), water-in-oil emulsion, oil-in-water emulsion, water-in-oil-in-water emulsion. The emulsion can be based in particular on light liquid paraffin oil (European Pharmacopea type); isoprenoid oil such as squalene or squalene oil resulting from the oligomerization of alkenes, in particular of isobutene or decene; esters of acids or of alcohols containing a linear alkyl group, more particularly plant oils, ethyl oleate, propylene glycol di-(caprylate/caprate), glyceryl tri-(caprylate/caprate) or propylene glycol dioleate; esters of branched fatty acids or alcohols, in particular isostearic acid esters. The oil is used in combination with emulsifiers to form the emulsion. The emulsifiers are preferably nonionic surfactants, in particular esters of sorbitan, of mannide (e.g. anhydromannitol oleate), of glycol, of polyglycerol, of propylene glycol and of oleic, isostearic, ricinoleic or hydroxystearic acid, which are optionally ethoxylated, and polyoxypropylene-polyoxyethylene copolymer blocks, in particular the Pluronic products, especially L121. See Hunter et al., The Theory and Practical Application of Adjuvants (Ed. Stewart-Tull, D. E. S.). John Wiley and Sons, NY, pp 51-94 (1995) and Todd et al., Vaccine 15:564-570 (1997).

[0109] For example, it is possible to use the SPT emulsion described on page 147 of “Vaccine Design, The Subunit and Adjuvant Approach” edited by M. Powell and M. Newman, Plenum Press, 1995, and the emulsion MF59 described on page 183 of this same book.

[0110] A further instance of an adjuvant is a compound chosen from the polymers of acrylic or methacrylic acid and the copolymers of maleic anhydride and alkenyl derivative. Advantageous adjuvant compounds are the polymers of acrylic or methacrylic acid which are cross-linked, especially with polyalkenyl ethers of sugars or polyalcohols. These compounds are known by the term carbomer (Phameuropa Vol. 8, No. 2, June 1996). Persons skilled in the art can also refer to U.S. Pat. No. 2,909,462 which describes such acrylic polymers cross-linked with a polyhydroxylated compound having at least 3 hydroxyl groups, preferably not more than 8, the hydrogen atoms of at least three hydroxyls being replaced by unsaturated aliphatic radicals having at least 2 carbon atoms. The preferred radicals are those containing from 2 to 4 carbon atoms, e.g. vinyls, allyls and other ethylenically unsaturated groups. The unsaturated radicals may themselves contain other substituents, such as methyl. The products sold under the name Carbopol; (BF Goodrich, Ohio, USA) are particularly appropriate. They are cross-linked with an allyl sucrose or with allyl pentaerythritol. Among then, there may be mentioned Carbopol 974P, 934P and 971P. Among the copolymers of maleic anhydride and alkenyl derivative, the copolymers EMA (Monsanto) which are copolymers of maleic anhydride and ethylene. The dissolution of these polymers in water leads to an acid solution that will be neutralized, preferably to physiological pH, in order to give the adjuvant solution into which the immunogenic, immunological or vaccine composition itself will be incorporated.

[0111] Further suitable adjuvants include, but are not limited to, the RIM adjuvant system (Ribi Inc.), Block co-polymer (CytRx, Atlanta Ga.), SAF-M (Chiron, Emeryville Calif.), monophosphoryl lipid A, Avridine lipid-amine adjuvant, heat-labile enterotoxin from E. coli (recombinant or otherwise), cholera toxin, IMS 1314 or muramyl dipeptide among many others.

[0112] Preferably, the adjuvant is added in an amount of about 100 μg to about 10 mg per dose. Even more preferably, the adjuvant is added in an amount of about 100 μg to about 10 mg per dose. Even more preferably, the adjuvant is added in an amount of about 500 μg to about 5 mg per dose. Even more preferably, the adjuvant is added in an amount of about 750 μg to about 2.5 mg per dose. Most preferably, the adjuvant is added in an amount of about 1 mg per dose.

[0113] “Sequence Identity” as it is known in the art refers to a relationship between two or more polypeptide sequences or two or more polynucleotide sequences, namely a reference sequence and a given sequence to be compared with the reference sequence. Sequence identity is determined by comparing the given sequence to the reference sequence after the sequences have been optimally aligned to produce the highest degree of sequence similarity, as determined by the match between strings of such sequences. Upon such alignment, sequence identity is ascertained on a position-by-position basis, e.g., the sequences are “identical” at a particular position if at that position, the nucleotides or amino acid residues are identical. The total number of such position identities is then divided by the total number of nucleotides or residues in the reference sequence to give % sequence identity. Sequence identity can be readily calculated by known methods, including but not limited to, those described in Computational Molecular Biology, Lesk, A. N., ed., Oxford University Press, New York (1988), Biocomputing: Informatics and Genome Projects, Smith, D. W., ed., Academic Press, New York (1993); Computer Analysis of Sequence Data, Part I, Griffin, A. M., and Griffin, H. G., eds., Humana Press, New Jersey (1994); Sequence Analysis in Molecular Biology, von Heinge, G., Academic Press (1987); Sequence Analysis Primer, Gribskov, M. and Devereux, J., eds., M. Stockton Press, New York (1991); and Carillo, H., and Lipman, D., SIAM J. Applied Math., 48: 1073 (1988), the teachings of which are incorporated herein by reference. Preferred methods to determine the sequence identity are designed to give the largest match between the sequences tested. Methods to determine sequence identity are codified in publicly available computer programs which determine sequence identity between given sequences. Examples of such programs include, but are not limited to, the GCG program package (Devereux, J., et al., Nucleic Acids Research, 12(1):387 (1984)), BLASTP, BLASTN and FASTA (Altschul, S. F. et al., J. Molec. Biol., 215:403-410 (1990). The BLASTX program is publicly available from NCBI and other sources (BLAST Manual, Altschul, S. et al., NCVI NLM NIH Bethesda, Md. 20894, Altschul, S. F. et al., J. Molec. Biol., 215:403-410 (1990), the teachings of which are incorporated herein by reference). These programs optimally align sequences using default gap weights in order to produce the highest level of sequence identity between the given and reference sequences. As an illustration, by a polynucleotide having a nucleotide sequence having at least, for example, 85%, preferably 90%, even more preferably 95% “sequence identity” to a reference nucleotide sequence, it is intended that the nucleotide sequence of the given polynucleotide is identical to the reference sequence except that the given polynucleotide sequence may include up to 15, preferably up to 10, even more preferably up to 5 point mutations per each 100 nucleotides of the reference nucleotide sequence. In other words, in a polynucleotide having a nucleotide sequence having at least 85%, preferably 90%, even more preferably 95% identity relative to the reference nucleotide sequence, up to 15%, preferably 10%, even more preferably 5% of the nucleotides in the reference sequence may be deleted or substituted with another nucleotide, or a number of nucleotides up to 15%, preferably 10%, even more preferably 5% of the total nucleotides in the reference sequence may be inserted into the reference sequence. These mutations of the reference sequence may occur at the 5′ or 3′ terminal positions of the reference nucleotide sequence or anywhere between those terminal positions, interspersed either individually among nucleotides in the reference sequence or in one or more contiguous groups within the reference sequence. Analogously, by a polypeptide having a given amino acid sequence having at least, for example, 85%, preferably 90%, even more preferably 95% sequence identity to a reference amino acid sequence, it is intended that the given amino acid sequence of the polypeptide is identical to the reference sequence except that the given polypeptide sequence may include up to 15, preferably up to 10, even more preferably up to 5 amino acid alterations per each 100 amino acids of the reference amino acid sequence. In other words, to obtain a given polypeptide sequence having at least 85%, preferably 90%, even more preferably 95% sequence identity with a reference amino acid sequence, up to 15%, preferably up to 10%, even more preferably up to 5% of the amino acid residues in the reference sequence may be deleted or substituted with another amino acid, or a number of amino acids up to 15%, preferably up to 10%, even more preferably up to 5% of the total number of amino acid residues in the reference sequence may be inserted into the reference sequence. These alterations of the reference sequence may occur at the amino or the carboxyl terminal positions of the reference amino acid sequence or anywhere between those terminal positions, interspersed either individually among residues in the reference sequence or in the one or more contiguous groups within the reference sequence. Preferably, residue positions which are not identical differ by conservative amino acid substitutions. However, conservative substitutions are not included as a match when determining sequence identity.

[0114] “Sequence homology”, as used herein, refers to a method of determining the relatedness of two sequences. To determine sequence homology, two or more sequences are optimally aligned, and gaps are introduced if necessary. However, in contrast to “sequence identity”, conservative amino acid substitutions are counted as a match when determining sequence homology. In other words, to obtain a polypeptide or polynucleotide having 95% sequence homology with a reference sequence, 85%, preferably 90%, even more preferably 95% of the amino acid residues or nucleotides in the reference sequence must match or comprise a conservative substitution with another amino acid or nucleotide, or a number of amino acids or nucleotides up to 15%, preferably up to 10%, even more preferably up to 5% of the total amino acid residues or nucleotides, not including conservative substitutions, in the reference sequence may be inserted into the reference sequence. Preferably the homologous sequence comprises at least a stretch of 50, even more preferably 100, even more preferably 250, even more preferably 500 nucleotides.

[0115] A “conservative substitution” refers to the substitution of an amino acid residue or nucleotide with another amino acid residue or nucleotide having similar characteristics or properties including size, hydrophobicity, etc., such that the overall functionality does not change significantly.

[0116] Isolated” means altered “by the hand of man” from its natural state, i.e., if it occurs in nature, it has been changed or removed from its original environment, or both. For example, a polynucleotide or polypeptide naturally present in a living organism is not “isolated,” but the same polynucleotide or polypeptide separated from the coexisting materials of its natural state is “isolated”, as the term is employed herein.

[0117] “Modified polypeptide” of a polypeptide according to the disclosure is understood as designating a polypeptide obtained by genetic recombination or by chemical synthesis as will be described below, having at least one modification with respect to the normal sequence. These modifications will especially be able to bear an amino acids at the origin of a specificity, of pathogenicity and/or of virulence, or at the origin of the structural conformation, and of the capacity of membrane insertion of the polypeptide according to the disclosure. It will thus be possible to create polypeptides of equivalent, increased or decreased activity, and of equivalent, narrower, or wider specificity. Among the modified polypeptides, it is necessary to mention the polypeptides in which up to 5 amino acids can be modified, truncated at the N- or C-terminal end, or even deleted or added.

[0118] As is indicated, the modifications of the polypeptide will especially have as objective: to render it capable of modulating, of inhibiting or of inducing the expression of ASFV gene and/or capable of modulating the replication cycle of ASFV in the cell and/or the host organism, of allowing its incorporation into vaccine compositions, and/or of modifying its bioavailability as a compound for therapeutic use.

[0119] The methods allowing said modulations on eukaryotic or prokaryotic cells to be demonstrated are well known to the person skilled in the art. It is likewise well understood that it will be possible to use the nucleotide sequences coding for said modified polypeptides for said modulations, for example through vectors according to the disclosure and described below, in order, for example, to prevent or to treat the pathologies linked to the infection.

[0120] The preceding modified polypeptides can be obtained by using combinatorial chemistry, in which it is possible to systematically vary parts of the polypeptide before testing them on models, cell cultures or microorganisms for example, to select the compounds which are most active or have the properties sought.

[0121] Chemical synthesis likewise has the advantage of being able to use unnatural amino acids, or nonpeptide bonds. Thus, in order to improve the duration of life of the polypeptides according to the disclosure, it may be of interest to use unnatural amino acids, for example in D form, or else amino acid analogs, especially sulfur-containing forms, for example.

[0122] Finally; it will be possible to integrate the structure of the polypeptides according to the disclosure, its specific or modified homologous forms, into chemical structures of polypeptide type or others. Thus, it may be of interest to provide at the N- and C-terminal ends compounds not recognized by the proteases.

### EXAMPLES

[0123] The following examples illustrate embodiments of the disclosure. Nothing in these examples should be limiting to the disclosure as these are representative in nature.

### Example 1

[0124] This example ranked ASFV ORFs for their ability to bind to SLA alleles.

### Materials and Methods

[0125] All the conserved ASFV (Georgia 2007/1) open-reading frames (ORFs) were screened for the presence of peptide motifs that bind strongly to 75 defined SLA I alleles and identified novel targets containing putative CTL epitopes (found on the web at cbs.dtu.dk/services/NetMHCpan/). The targets were ranked based on the number of putative CTL epitopes and binding affinity. As shown in FIG. 1A, ORFs were screened using 75 SLA alleles. The binding affinities of top 3 strong binders [SBs] (example in blue color) were used to calculate mean binding affinity for each ORF. The mean binding affinities from the 75 alleles were used to calculate grand mean binding affinities and the outcome was used to rank the ORFs as illustrated using means from 3 alleles. This ranking criterion is reasonable since it is based on putative epitopes as predicted by their ability to bind to SLA alleles. Three ORFs (B385R, A859L, G1340L) and three SLA alleles (SLA-1*0701; SLA-2*0401; and SLA-3*0503) were used to illustrate the down selection criteria. The algorithm, as described in NetMHCpan-4.0: Improved Peptide-MHC Class I Interaction Predictions Integrating Eluted Ligand and Peptide Binding Affinity Data. Vanessa Jurtz, Sinu Paul, Massimo Andreatta, Paolo Marcatili, Bjoern Peters and Morten Nielsen. The Journal of Immunology (2017) ji1700893; DOI: 10.4049/jimmunol.1700893; or NetMHCpan-3.0: improved prediction of binding to MHC class I molecules integrating information from multiple receptor and peptide length data sets. Morten Nielsen and Massimo Andreatta. Genome Medicine (2016): 8:33; and NetMHCpan, a method for MHC class I binding prediction beyond humans. Ilka Hoof, Bjoern Peters, John Sidney, Lasse Eggers Pedersen, Ole Lund, Soren Buus, and Morten Nielsen. Immunogenetics 61.1 (2009): 1-13] (the teachings and contents of which are incorporated by reference herein) predicts binding of peptides to known MHC molecules using Artificial Neural Networks. All the ASFV open reading frames [ORFs] selected were subjected to this process and shown to contain multiple putative strong MHC I-binding peptide motifs. MHC-1 molecules have a strong preference for binding 9-mer peptides. The output is based on predicted binding affinity and is presented as either strong binder (SB) or weak binder (WB). Some ORFs have several predicted SBs, some have one or two, whereas others have none. However, only peptides with high affinity can compete for binding to the cognate MHC molecule(s). The grand mean affinity is expected to be a representative estimated binding index for each ORF. FIG. 1B illustrates a flow diagram summarizing the down selection work flow. The targets were validated using ASFV convalescent serum followed by in vitro confirmation of the SLA class I-binding motifs using peptides. One hundred ORFs were selected (see list below) and used to design multicistronic expression cassettes separated by an efficient self-cleaving 2A peptide linker (FIG. 2A). The multicistronic expression cassettes were modified to add, in-frame, a HA-tag at the N-termini and a FLAG-tag at the C-termini (FIG. 2A). The amino acid sequences of the multicistronic cassettes were used to design synthetic genes codon-optimized for protein expression in swine cells. Recombinant DNA and SC-Ad expression constructs were generated using the synthetic genes (FIG. 2B). Protein expression by the constructs was evaluated by immunocytometric analysis using anti-HA and anti-FLAG monoclonal antibodies (mAbs), and ASFV-specific convalescent serum was used to validate authenticity of the expressed antigens (FIG. 2B). Protein expression by recombinant SC-Ad was confirmed by immunocytometric analysis of infected cells using anti-FLAG mAb (upper panel) and authenticity was validated by the ASFV convalescent serum (lower panel). Note: SC-Ad 2-4 on upper panel—most of the infected cells lifted off Virus dose was reduced for the lower panel to solve this problem. Data shown is for four constructs. Auto-cleavage of the 2A peptide linker is verifiable using Western blot probed with anti-tag mAbs. Peptides (9-mer) were used to validate the predicted ASFV (Georgia 2007/1) SLA I binding motifs by IFN-γ EliSpot assay using splenocytes from immunized pigs (FIG. 3).

### Results and Discussion

[0126] Since peptide presentation by Swine Leukocyte Antigen I (SLA I) is required to prime and expand CTLs, a strategy that utilizes an algorithm based on SLA I-peptide binding is expected to identify putative candidate antigens based on the presence of peptide motifs predicted to bind with high affinity to defined SLA I molecules.

[0127] The flow diagram in FIG. 2A illustrates the design of multicistronic cassettes for the ASFV antigens. Up to seven ORFs were included in a single cassette since the adenovirus vector can accommodate insert size of up to 8 kb. Codon-optimized synthetic genes were first cloned into pCDNA3 mammalian expression vector which has a strong CMV promoter (CMVp) and anti-HA/FLAG mAbs were used to confirm protein expression (data not shown). The photographs in FIG. 2B illustrate the validation of protein expression. The graph in FIG. 3 illustrates IFN-γ response to predicted SLA I binding motifs. Sample data from 3 pools (20 peptides/pool) is shown. Some pigs (e.g. #4) had strong responses against multiple pools.

### Example 2

[0128] This example demonstrates RD-Ad primed antibody responses against ASFV antigens, recognition of ASF virus (Georgia 2007/1) by sera from vaccinees, RD-Ad primed IFN-γ responses against ASFV antigens, and RD-Ad primed CTL responses.

### Materials and Methods

[0129] To demonstrate RD-Ad primed antibody responses against ASFV antigens, three immunogen formulations were tested. Formulation 1 (pig #s 1-5: 1×10¹⁰ ifu/adjuvant 1); Formulation 2 (pig #s 6-10: 1×10¹¹ ifu/adjuvant 1); Negative controls (pig #s 11-15: 1×10¹¹ ifu); and Formulation 3 (pig #s 16-20: 1×10¹¹ ifu/adjuvant 2). The positive control was ASFV-specific convalescent serum (red star symbol). Antibody endpoint titers were determined by ELISA (data for representative antigens is shown). Results are provided in FIG. 4A.

[0130] To demonstrate and validate recognition of ASF virus (Georgia 2007/1) by sera from vaccinees, IFA was conducted using ASFV-infected primary porcine macrophages probed with sera from blood collected 1 week post-boost. Representative data for the vaccinees and negative controls are shown in FIG. 4B.

[0131] To demonstrate RD-Ad primed IFN-γ responses against ASFV antigens. IFN-γ responses for two representative antigens, p37 and p150, are shown in FIG. 5A and FIG. 5B, respectively. Both of these ASFV antigens are part of the pp220 polyprotein. Treatment groups are as indicated in FIG. 5

[0132] To demonstrate RD-Ad primed CTL responses, ASFV antigen-specific CTL responses were evaluated by standard ⁵¹Cr release assays using PBMCs isolated post-boost. CTL activity, at defined effector-target ratios, was determined using ⁵¹Chromium-labelled autologous skin fibroblasts (targets) transfected with DNA construct expressing cognate antigen. Fibroblasts transfected with a construct expressing an FMD antigen served as negative control targets. Priming of CTLs was influenced by the type of adjuvant used. FIG. 6A illustrates the RD-Ad ASFV antigen cocktail formulated with ENABL adjuvant (Benchmark Biolabs). FIG. 6B illustrates the RD-Ad ASFV antigen cocktail formulated with TXO adjuvant (Zoetis).

### Example 3

[0133] This example determines survival and viremia post-challenge with ASFV.

### Materials and Methods

[0134] Pigs were immunized with either RD-Ad ASFV antigen cocktail formulated in TXO adjuvant (T1) or ENABL adjuvant (T2). Negative controls received RD-Ad expressing Luciferase formulated in TXO (C1) or ENABL (C2), respectively. The pigs were challenged with 3 log₁₀ TCID₅₀ ASFV [Georgia 2007/1] administered intranasally. Viremia in blood at termination was determined by qPCR.

### Results

[0135] Results are provided in FIGS. 7A and 7B. As can be seen, 5/9 pigs from the TI group were alive and healthy 17 days post-challenge compared to 2/10 from the T2 group, 2/5 pigs from the CI and C2. However, the pigs from the T2, C1, and C2 were moribund [based on clinical scores and evaluation by attending veterinarian] and needed to be euthanized.

### Example 4

[0136] This example estimates protein concentration.

### Materials and Methods

[0137] Protein concentration was estimated using BCA and antigen loads were normalized by SDS-PAGE analysis. Dot blots were probed with convalescent serum. Antigens were titrated and the blot was probed at 1:5,000 serum dilution: 1) p′72; 2) p62; 3) p54; 4) p32; and 5) KP1712 chimera. Results are provided in FIG. 8A. Probing a blot loaded with 4 ng of each antigen showed that PK1712 was better than p32, p54 & p72 at 1:5,000. Results are provided in FIG. 8B. Additionally, KP1712 was the only one detectable at 1:50,000. Notably, p32, p54, and p72 were not detectable at 1:20,000, but KP1712 was still detectable at 1:100,000 serum dilution (data not shown). Results are provided in FIG. 8C.

### Results and Discussion

[0138] It is desirable to develop a vaccine and a compatible diagnostic tool capable of differentiating infected from vaccinated animals [DIVA]. In the course of validating ASFV antigens using the ASFV convalescent serum, a chimeric antigen designated KP1712, was recognized more strongly than p32, p54, p′72, and pp62 which have previously been evaluated as diagnostic antigens. The convalescent serum is a valuable probe since it was produced by sequential infection of a pig with a series of tissue culture-adapted and wild-type viruses from genotypes I (DR11, Haiti 81, Lisbon 60, Malawi 83, and UG-61), VIII, and X (13). The serum was gamma-irradiated and provided by DHS S&T. There is a p72-based Lateral Flow Device (LFD) in the market (Ingenasa, Spain) and the OIE's ASFV reference ELISA (INgezim PPA COMPAC) utilizes virus lysate.

[0139] The results indicate that a KP1712-based LFD will likely be a superior diagnostic tool. Notably, this was confirmed by comparing the reactivity of the convalescent serum against normalized amounts of affinity purified antigens (quality control validated by Western Blot) using Dot Blot assay (FIG. 8). The sensitivity limit for the recombinant KP1712 chimera was determined to be <0.24 ng, which is 16 fold lower than for p72 (3.9 ng) and 32 fold lower than p32 and p54 (7.8 ng) (FIG. 8). Therefore, the KP1712 antigen is being used to develop a prototype Lateral Flow Device (LFD) as a highly sensitive tool for ASFV diagnosis using saliva and sera from pigs and wild boars.

[0140] Relevant to development of a subunit vaccine and a compatible DIVA diagnostic tool, the p72 antigen contains antibody and CTL epitopes. In addition, it contains multiple predicted strong SLA I binding motifs. However, the KP1712 antigen has few and weak predicted SLA I binding motifs whose affinities are below cutoff threshold. Consequently, it is rational to retain the p72 antigen in a vaccine and utilize the KP1712 as a diagnostic antigen.

### Example 5

[0141] This example prepares representative multicistronic cassettes useful for administration to subjects in need thereof.

### Materials and Methods

[0142] The selected ASFV [Georgia 2007/1] polypeptide sequences were used to design multicistronic expression cassettes separated by an efficient self-cleaving 2A peptide linker as illustrated in FIG. 2A using ORF1 [generally genes encoding large antigens: ˜3.5 kb], ORF2 [genes encoding medium size antigens: ˜2 kb], and ORF3 [genes encoding small antigens: ˜1 kb] as an example. The multicistronic cassettes contains 3-7 ORFs and overall chimeric gene size was limited to about 4.5 kb for stability and protein expression efficiency. Each multicistronic polypeptide sequence cassette was modified to add, in-frame, a HA-tag at the N-termini and a FLAG-tag at the C-termini (FIG. 2A). The resultant amino acid sequences of the multicistronic cassettes were used to design synthetic genes codon-optimized for protein expression in swine cells. The synthetic genes were cloned into pCDNA3.1+ mammalian expression vector [outsourced from GenScript], which utilizes CMV promoter to drive protein expression. SC-Ad expression constructs were generated using the synthetic genes (FIG. 2B). Protein expression by the expression constructs was evaluated by immunocytometric analysis using anti-HA and anti-FLAG monoclonal antibodies (mAbs), and ASFV-specific convalescent serum was used to validate authenticity of the expressed antigens (FIG. 2B).

### Results

[0143] The following multicistronic cassettes were generated:

### Polypeptide Sequence Used to Generate Multicistronic Expression Cassettes:

1. p220.1
(SEQ ID NO. 102)
MGNRGSSTSSRPLPSSEANIYAKLQDHIQRQTRPFSGGGYFNGGGDKNPVQHIKDYHIDSVSSKA
KLRIIEGIIRAIAKIGFKVDTKQPIEDILKDIKKQLPDPRAGSTFVKNAEKQETVCKMIADAINQEFI
DLGQDKLIDTTEGAASICRQIVLYINSLTHGLRAEYLDVHGSIENTLENIKLLNDAIKQLHERMVT
EVTKAAPNEEVINAVTMIEAVYRRLLNEQNLQINILTNFIDNILTPTQKELDKLQTDEVDIIKLLND
TNSVLGTKNFGKVLSYTLCNLGIAASVANKINKALQKVGLKVEQYLQSKNWAEFDKELDLKRF
SGLVSAENIAEFEKAVNLLRQTFNERHKILENSCAKKGGDEEKTPLDRRIEAQRLDRKHILMEFL
NKSTQAYNDFLENVKKIGIKLVKEIALTPNITRLRDALSRINDMGTIALDLSLIGFYTNAAAREER
ETFLTQLTLVKNVLEEISKTDPNFKNLYDSCSRLLQIIDFYTDIVQKKYGGEEDCECTRVGGAALT
VEELGLSKAARSQVDLNQAINTFMYYYYVAQIYSNLTHNKQEFQSYEENYATILGDAIAGRLMQ
LDTEKNARINSPAVDLARGHVGPNPGGAQEVDWKATVSAIELEYDVKRRFYRALEGLDLYLKNI
TKTFVNNIDSIQTVQQMLDGVRIIGRWFTETTGDTLAQVFESFPTSTGNDSNVFTDNAPAGHYYE
KVAAEIQQGRSVGTLRPVRASQAKNIRDLIGRSLSNFQALKNIINAFARIGDMLGGEELRQMVPM
SPLQIYKTLLEYLQHSALSVGLKNLNQSEIGGQRMALAQTAEEAAQRVYLSTVRVNDALSTRWE
TEDVFFTFMLKSMAAKIFIVLGIYDMFERPEPVYKLIPTRMILGGADELEPEVIPEAAELYFRLPRL
AEFYQKLFSFRDENVQISMLPELEGIFSGLIRIIFMRPIELINIGDYSETEIRQLIKEINVIYQHFNLEY
GEQEATKKALIHFVNEINRRFGVITRTEWEKFQRIVQEARTMNDFGMMNQTNYSILPDEDGYTQ
SSQLLPSDRFISPSTQPTPKWRPALYNIDSVDVQTGMLQPNSQWDLVQKFRKQLSEMFEDPSLQQ
ELGKISYQELIRQAINELKKEHTDKIQIVSKLIQGSESLADTDVNKIFLFHETVITGLNLLSAIYVLL
NNFRNNIKGLDLDTIQKSIIEWLRETQAANVNRANLIDWLGRKHGAISEIRNPGLVIKEINMRLSM
VYPDPTTEAAAA
2. p220.2
(SEQ ID NO. 103)
GLDLDTIQKSIIEWLRETQAANVNRANLIDWLGRKHGAISEIRNPGLVIKEINMRLSMVYPDPTTE
AAAAAQDRNLTTETLFAWIVPYVGIPAGGGVRPEQELAARYLVDNQRIMQLLLTNIFEMTSSFN
KMVQVRFPETSTAQVHLDFTGLISLIDSLMADTKYFLDLLRPHIDKNIIQYYENRSNPGSFYWLEE
HLIDKLIKPPTDAGGRPLPGGELGLEGVNQIINKTYTLLTKPYNVLQLRGGAQRRDAANIQINNNP
QSSERFEQYGRVFSRLVFYDALENNSGLRVEQVALGDFRLSNLIRTNNAQEENTLSYWDNIALRT
YANVNDAANNLRRYRLYGSDYGIQNNRSMMMVFNQLIASYITRFYDAPSGKIYLNLINAFANGN
FSQAVMEMGYAHPDLARNNNVFGHRGDPTEQSVLLLSLGLILQRLIKDTNRQGLSQHLISTLTEI
PIYLKENYRANLPLFNKMFNILISQGELLKQFIQYTNVQLARPNLTALLGANNDSVIYYNNNNVP
ATGLSVGQAALRGIGGVFRPNVTLMPLGDAQNNTSDVVRKRLVAVIDGIIRGSHTLADSAMEVL
HELTDHPIYLETEEHFIQNYMSRYNKEPLMPFSLSLYYLHDLRIENNEVYDPLLYPNLESGSPEFK
LLYGTRKLLGNDPVQLSDMPGVQLIMKNYNETVVAREQITPTRFEHFYTHAIQALRFIINIRSFKT
VMMYNENTFGGVNLISENRDDKPIITAGIGMNAVYSLRKTLQDVISFVESSYQEEQINHIHKIVSP
KGQTRTLGSNRERERIFNLFDMNIIPINVNALMRSIPLANIYNYDYSFEEIACLMYGISAEKVRSLD
TTAPQPDVAEVLNIPNRPPINTREFMLKLLINPYVSVSITQYGNELLSKGNAGYMSRIFRGDNALN
MGRPKFLSDQIFNKVLFGSLYPTQFDYDEAGPSLAAGIQRGRERWGHPMSIYINQALHEIVRTIRL
AETVRGLRNVIDRNQIIGELNAFRTQLEDTRREVNNLIQTPEIQNNPTPEIIAAIQNWVQQYRGQIT
NLIDLIGNAGQANSMINLIQNITPQTAGAQLTALFNIRGLPAPPPRQALQNDIEAMQWFMTMVIN
HPPVLIAPFMLLVNNLKEFLNTLERYVYKTPRWLGPGTARIAQPPVGMAPGINMRHHTSYTENS
VLTYITEQNREEGPWSIVKQVGVGIQKPTLVQIGKDRFDTRLIRNLIFITNIQRLLRLRLNLELSQFR
NVLVSPDHIINPSITEYGFSITGPSETFSDKQYDSDIRIL
3. p72-p15-B602L
(SEQ ID NO. 104)
MASGGAFCLIANDGKADKIILAQDLLNSRISNIKNVNKSYGKPDPEPTLSQIEETHLVHFNAHFKP
YVPVGFEYNKVRPHTGTPTLGNKLTFGIPQYGDFFHDMVGHHILGACHSSWQDAPIQGTSQMGA
HGQLQTFPRNGYDWDNQTPLEGAVYTLVDPFGRPIVPGTKNAYRNLVYYCEYPGERLYENVRF
DVNGNSLDEYSSDVTTLVRKFCIPGDKMTGYKHLVGQEVSVEGTSGPLLCNIHDLHKPHQSKPIL
TDENDTQRTCSHTNPKFLSQHFPENSHNIQTAGKQDITPITDATYLDIRRNVHYSCNGPQTPKYY
QPPLALWIKLRFWFNENVNLAIPSVSIPFGERFITIKLASQKDLVNEFPGLFVRQSRFIAGRPSRRNI
RFKPWFIPGVINEISLTNNELYINNLFVTPEIHNLFVKRVRFSLIRVHKTQVTHTNNNFIHDEKLMS
ALKWPIEYMFIGLKPTWNISDQNPHQHRDWHKFGHVVNAIMQPTHHAEISFQDRDTALPDACSS
ISDISPVTYPITLPIIKNISVTAHGINLIDKFPSKFCSSYIPFHYGGNAIKTPDDPGAMMITFALKPREE
YQPSGHINVSRAREFYISWDTDYVGSITTADLVVSASAINFLLLQNGSAVLRYSTGSGATNFSLLK
QAGDVEENPGPMADFNSPIQYLKEDSRDRTSIGSLEYDENADTMIPSFAAGLEEFEPIPDYDPTTS
TSLYSQLTHNMEKIAEEEDSNFLHDTREFTSLVPDEADNKPEDDEESGAKPKKKKHLFPKLSSHK
SKGSGATNFSLLKQAGDVEENPGPMAEFNIDELLKNVLEDPSTEISEETLKQLYQRTNPYKQFKN
DSRVAFCSFTNLREQYIRRLIMTSFIGYVFKALQEWMPSYSKPTHTTKTLLSELITLVDTLKQETN
DVPSESVVNTILSIADSCKTQTQKSKEAKTTIDSFLREHFVFDPNLHAQSAYTCADTNVDTCASM
CADTNVDTCASMCADTNVDTCASTCTSTEYTDLADPERIPLHIMQKTLNVPNELQADIDAITQTP
QGYRAAAHILQNIELHQSIKHMLENPRAFKPILFNTKITRYLSQHIPPQDTFYKWNYYIEDNYEEL
RAATESIYPEKPDLEFAFIIYDVVDSSNQQKVDEFYYKYKDQIFSEVSSIQLGNWTLLGSFKANRE
RYNYFNQNNEIIKRILDRHEEDLKIGKEILRNTIYHKKAKNIQETGPDAPGLSIYNSTFHTDSGIKG
LLSFKELKNLEKASGNIKKAREYDFIDDCEEKIKQLLSKENLTPDEESELIKTKKQLDNALEMLNV
PDDTIRVDNKLEKEILYTKAEL
4. p62-p32-p54-EP153R-p10
(SEQ ID NO. 105)
MPSNMKQFCKISVWLQQHDPDLLEIINNLCMLGNLSAAKYKHGVTFIYPKQAKIRDEIKKHAYS
NDPSQAIKTLESLILPFYIPTPAEFTGEIGSYTGVKLEVEKTEANKVILKNGEAVLVPAADFKPFPD
RRLAVWIMESGSMPLEGPPYKRKKEGGGNDPPVPKHISPYTPRTRIAIEVEKAFDDCMRQNWCS
VNNPYLAKSVSLLSFLSLNHPTEFIKVLPLIDFDPLVTFYLLLEPYKTHGDDFLIPETILFGPTGWN
GTDLYQSAMLEFKKFFTQITRQTFMDIADSATKEVDVPICYSDPETVHSYANHVRTEILHHNAVN
KVTTPNLVVQAYNELEQTNTIRHYGPIFPESTINALRFWKKLWQDEQRFVIHGLHRTLMDQPTYE
TSEFAEIVRNLRFSRPGNNYINELNITSPAMYGDKHTTGDIAPNDRFAMLVAFINSTDFLYTAIPEE
KVGGNETQTSSLTDLVPTRLHSFLNHNLSKLKILNRAQQTVRNILSNDCLNQLKHYVKHTGKNEI
LKLLQEGSGATNFSLLKQAGDVEENPGPMDFILNISMKMEVIFKTDLRSSSQVVFHAGSLYNWFS
VEIINSGRIVTTAIKTLLSTVKYDIVKSARIYAGQGYTEHQAQEEWNMILHVLFEEETESSASSENI
HEKNDNETNECTSSFETLFEQEPSSEVPKDSKLYMLAQKTVQHIEQYGKAPDFNKVIRAHNFIQTI
YGTPLKEEEKEVVRLMVIKLLKKISFYLTYIGSGATNFSLLKQAGDVEENPGPMDSEFFQPVYPR
HYGECLSPVTTPSFFSTHMYTILIAIVVLVIIIIVLIYLFSSRKKKAAAIEEEDIQFINPYQDQQWVEV
TPQPGTSKPAGATTASVGKPVTGRPATNRPATNKPVTDNPVTDRLVMATGGPAAAPAAASAPA
HPAEPYTTVTTQNTASQTMSAIENLRQRNTYTHKDLENSLGSGATNFSLLKQAGDVEENPGPMF
SNKKYIGLINKKEGLKKKIDDYSILIIGILIGTNILSLIINIIGEINKPICYQNDDKIFYCPKDWVGYNN
VCYYFGNEEKNYNASNYCKQLNSTLTNNTILVNLTKTLNLTKTYNHESNYWVNYSLIKNEV
LLRDSGYYKKQKHVSLLYICSKGSGATNFSLLKQAGDVEENPGPMPTKAGTKSTANKKTTKGSS
KSGSSRGHTGKTHASSSMHSGMLYKDMVNIARSRGIPIYQNGSRLTKSELEKKIKRSK
5. K205R-A104R-CD2vΔcd-A151R-9GL-K196R-CP80R
(SEQ ID NO. 106)
MVEPREQFFQDLLSAVDQQMDTVKNDIKDIMKEKTSFMVSFENFIERYDTMEKNIQDLQNKYEE
MAANLMTVMTDTKIQLGAIIAQLEILMINGTPLPAKKTTIKEAMPLPSSNTNNEQTSPPASGKTSE
TPKKNPTNAMFFTRSEWASSNTFREKFLTPEIQAILDEQFANKTGIERLHAEGLYMWRTQFSDEQ
KKMVKEMMKKGSGATNFSLLKQAGDVEENPGPMSTKKKPTITKQELYSLVAADTQLNKALIER
IFTSQQKIIQNALKHNQEVIIPPGIKFTVVTVKAKPARQGHNPATGEPIQIKAKPEHKAVKIRALKP
VHDMLNGSGATNFSLLKQAGDVEENPGPMIILIFLIFSNIVLSIDYWVSFNKTIILDSNITNDNNDIN
GVSWNFFNNSFNTLATCGKAGNFCECSNYSTSIYNITNNCSLTIFPHNDVFDTTYQVVWNQIINY
TIKLLTPATPPNITYNCTNFLITCKKNNGTNTNIYLNINDTFVKYTNESILEYNWNNSNINNFTATC
IINNTISTSNETTLINCTYLTLSSNYFYTFFKLYYIPLSIIIGITISILLISIITFLGSGATNFSLLKQAGDV
EENPGPMNKKIIVMMALLHKEKLIECIYHELENGGTILLLTKNIVVSEISYIGNTYKYFTFNDNHD
LISKEDLKGATSKNIAKMIYNWIIKNPQNNKIWSGEPRTQIYFENDLYHTNYNHKCIKDFWNVST
SVGPHIFNDRSIWCTKCTSFYPFTNIMSPNIFQGSGATNFSLLKQAGDVEENPGPMLHWGPKYWR
SLHLYAIFFSDAPSWKEKYEAIQWILNFIESLPCTRCQHHAFSYLTKNPLTLNNSEDFQYWTFAFH
NNVNNRLNKKIISWSEYKNIYEQSILKTIEYGKTDFIGAWSSLGSGATNFSLLKQAGDVEENPGP
MNIIRKLKPGTISLVLGPMFAGKTTFLIHCIYMLERLEKKVVFIKSTKNTRDKTIKTHSGIQLRPKQ
CKIIESTQLSDVGSLTDIHAVVVDEAHFFDDLITCRTWAEEEKIIILAGLNASFEQKMFPPIVRIFPY
CSWVKYIGRTCMKCNQHNACFNVRKNADKTLILAGGSELYVTCCNNCLKNTFIKQLQPIKYGSG
ATNFSLLKQAGDVEENPGPMLIPVVCFTCGFPIGTYAAIFDKARTEYIKTKMGGTLPQNIPLDASL
QIELKDLITALGIPMRVCCRTHLITTLDYRKYY
6. B438L-R298L-NP419L-K145R
(SEQ ID NO. 107)
MYHDYASKLLADYRSDPPLWESDLPRHNRYSDNILNSRYCGNKNGAAPVYNEYTNSPEKAEKG
LQLSDLRNFSFMLNPQHKNIGYGDAQDLEPYSSIPKNKLFNHFKNHRPAFSTHTENLIRRNVVRT
EKKTFPQVASLKGTQKNCLTQPSSLPSLKNPKNSSVPSTRFSEHTKFFSYEDLPKLRTKGTIKHEQ
HLGDQMPGQHYNGYIPHKDVYNILCLAHNLPASVEKGIAGRGIPLGNPHVKPNIEQELIKSTSTY
TDVPMLGPLPPKDSQHGREYQEFSANRHMLQVSNILHSVFANHSIKPQILEDIPVLNAQLTSIKPV
SPFLNKAYQTHYMENIVTLVPRFKSIANYSSPIPNYSKRNSGQAEYFDTSKQTISRHNNYIPKYTG
GIGDSKLDSTFPKDFNASSVPLTSAEKDHSLRGDNSACCISSISPSLGSGATNFSLLKQAGDVEENP
GPMSRPEQQLKKMLKNPQAQYAFYPTAKVERISTTQHMYFIATRPMFEGGRNNVFLGHQVGQPI
IFKYVSKKEIPGNEVIVLKALQDTPGVIKLIEYTENAMYHILIIEYIPNSVDLLHYHYFKKLEETEA
KKIIFQLILIIQNIYEKGFIHGDIKDENLIIDINQKIIKVIDFGSAVRLDETRPQYNMFGTWEYVCPEF
YYYGYYYQLPLTVWTIGMVAVNLFRFRAENFYLNDILKRENYIPENISETGKQFITECLTINENKR
LSFKSLVSHPWFKGLKKEIQPISELGVDYKNVITGSGATNFSLLKQAGDVEENPGPMLNQFPGQY
SNNIFCFPPIESETKSGKKASWIICVQVVQHNTIIPITDEMFSTDVKDAVAEIFTKFFVEEGAVRISK
MTRVTEGKNLGKKNATTVVHQAFKDALSKYNRHARQKRGAHTNRGIIPPMLVKYFNIIPKTFFE
EETDPIVQRKRNGVRAVACQQGDGSILLYSRTKKEFLGLDNIKKELKQLYLFIDVRVYLDGELYL
HRKPLQWIAGQANAKTDSSELHFYVFDCFWSDQLQMPSNKRQQLLTNIFKQKEDLTFIHQVENF
SVKNVDEALRLKAQFIKEGYEGAIVRNANGPYEPGYNNYHSAHLAKLKPLLDAEFILVDYTQGK
KGKDLGAILWVCELPNKKRFVVTPKHLTYADRYALFQKLTPALFKKHLYGKELTVEYAELSPKT
GIPLQARAVGFREPINVLEIIGSGATNFSLLKQAGDVEENPGPMDHYLKKLQDIYTKLEGHPFLFS
PSKTNEKEFITLLNQALASTQLYRSIQQLFLTMYKLDPIGFINYIKTSKQEYLCLLINPKLVTKFLKI
TSFKIYINFRLKTFYISPNKYNNFYTAPSEEKTNHLLKEEKTWAKIVEEGGEES
7. B385R-F334L-CP312R-H108R-F165R
(SEQ ID NO. 108)
MDEIINKYQAVEKLFKEIQQGLAAYDQYKTLISEMMHYNNHIKQEYFNFLMIISPYLIRAHSGETL
RNKVNNEIKRLILVENINTKISKTLVSVNFLLQKKLSTDGVKTKNMWCTNNPMLQVKTAHNLFK
QLCDTQSKTQWVQTLKYKECKYCHTDMVFNTTQFGLQCPNCGCIQELMGTIFDETHFYNHDGQ
KAKSGIFNPNRHYRFWIEHILGRNPEQELGTKQDPCGTKVLQQLKKIIKRDNKCIALLTVENIRKM
LKEINRTDLNNCVSLILRKLTGVGPPQISESILLRGEYIFTEAIKIREKVCKKGRINRNYYPYYIYKIF
DAILPPNDTTNRRILQYIHLQGNDTLANNDSEWESICMELPEIKWKPTDRTHCVHFFGSGATNFSL
LKQAGDVEENPGPMLIFISNMEELLIENSQRFTIFPIQHPECWNWYKKLESLTWTAQEVDMCKDI
DDWEAMPKPQREFYKQILAFFVVADEIVIENLLTNFMREIKVKEVLYFYTMQAAQECVHSEAYSI
QVKTLIPDEKEQQRIFSGIEKHPIIKKMAQWVRQWMDPDRNTLGERLVGFAAVEGILFQNHFVAI
QFLKEQNIMPGLVSYNEFISRDEGMHCSFACFLISNYVYNIPEEKIIHKILKEAVELVDEFINYAFD
KARGRVPGFSKEMLFQYIRYFTDNLCFMMQCKSIYKVGNPFPQMTKFFLNEVEKTNFFELRPTQ
YQNCVKDDAFAFKLFLNDDDFGSGATNFSLLKQAGDVEENPGPMTTHIFHADDLLQALQQAKA
EKNFSSVFSLDWDKLRTAKRNTTVKYVTVNVIVKGKKAPLMFNFQNEKHVGTIPPSTDEEVIRM
NAENPKFLVKKRDRDPCLQFNKYKISPPLEDDGLTVKKNEQGEEIYPGDEEKSKLFQIIELLEEAF
EDAVQKGPEAMKTKHVIKLIQRKISNSAVKNADKPLPNPIARIRIKINPATSILTPILLDKNKPITLQ
NGKTSFEELKDEDGVKANPDNIHKLIESHSIHDGIINARSICISNMGISFPLCLEMGVVKVFEKNNG
IDVNSIYGSDDISTLVNQIAIAGSGATNFSLLKQAGDVEENPGPMVNLFPVFTLIVIITILITTRELST
TMLIVSLVTDYIIINTQYTEQQHENNTFFMPQKNSFNESYNKDKKSNIHIPYQWLAPELKEAESKY
WWGNYDPHSEPVLAGASGSGATNFSLLKQAGDVEENPGPMVNPNKRIMNKKSKQASISSILNFF
FFYIMEYFVAVDNETSLGVFTSIEQCEETMKQYPGLHYVVFKYMCPADAENTDVVYLIPSLTLHT
PMFVDHCPNRTKQARHVLKKINLVFEEESIENWKVSVNTVFPHVHNRLSAPKLSIDEANEAVEKF
LIQAGRLMSL
8. F778R-S273R-MGF100.1L_B66L
(SEQ ID NO. 109)
METFFIETLASDVYGKALNVDLDRLSQAQVKYTLQELISYCSALTILHYDYSTLAARLSVYQLHQ
STASSFSKAVRLQAAQSCSRLSPQFVDVVYKYKAIFDSYIDYSRDYKLSLLGIETMKNSYLLKNK
DGVIMERPQDAYMRVAIMIYGMGRVVNMKMILLTYDLLSQHVITHASPTMFNAGTKKPQLSSC
FLLNVNDNLENLYDMVKTAGIISGGGGGIGLCLSGIRAKNSFISGSGLKSNGIQNYIVLQNASQCY
ANQGGLRPGAYAVYLELWHQDIFTFLQMPRLKGQMAEQRLNAPNLKYGLWVPDLFMEILEDQI
HNRGDGKWYLFSPDQAPNLHKVFDLERSQHENAHREFKKLYYQYVAEKRYTGVTTAKEIIKEW
FKTVVQVGNPYIGFKDAINRKSNLSHVGTITNSNLCIEVTIPCWEGDKAEQGVCNLAAVNLAAFI
RENGYDYRGLIEASGNVTENLDNIIDNGYYPTEATRRSNMRHRPIGIGVFGLADVFASLKMKFGS
PEAIAMDEAIHAALYYGAMRRSIELAKEKGSHPSFPGSAASKGLLQPDLWVRCGDLVSSWEERV
AQTTQGVLTPKRWSQLRLAAMQGLRNGYVTALMPTATSSNSTGKNECFEPFTSNLYTRRTLSGE
FIVLNKYLIDDLKEINLWTEAIQQQLLNAGGSIQHILDIPAEIRDRYKTSREMNQKILTKHAAARN
PFVSQSMSLNYYFYEPELSQVLTVLVLGWKKGLTTGSYYCHFSPGAGTQKKIIRNSEKACNADC
EACLLGSGATNFSLLKQAGDVEENPGPMSILEKITSSPSECAEHLTNKDSCLSKKIQKELTSFLEK
KETLGCDSESCVITHPAVKAYAQQKGLDLSKELETRFKAPGPRNNTGLLTNFNIDETLQRWAIKY
TKFFNCPFSMMDFERVHYKFNQVDMVKVYKGEELQYVEGKVVKRPCNTFGCVLNTDFSTGTG
KHWVAIFVDMRGDCWSIEYFNSTGNSPPGPVIRWMERVKQQLLKIHHTVKTLAVTNIRHQRSQT
ECGPYSLFYIRARLDNVSYAHFISARITDEDMYKFRTHLFRIAGSGATNFSLLKQAGDVEENPGP
MGNKESKYLEMCSEEAWLNIPNIFKCIFIRKLFYNKWLKYQEKKLKKSLKLLSFYHPKKDFVGIR
DMLQMAPGGSYFITDNMTEEFLMLVVKHPEDGSAEFTKLCLKGSCIVIDGYYYDNLHIFISETPDI
YKYPLIRYDRMDIKRALILFLLFLVVLSNAFVDYIISNFNHAVTCRKPTYFGIVLQGIFLVILFSIVD
YLINENIL
9. NP868R-H339R
(SEQ ID NO. 110)
MASLDNLVARYQRCFNDQSLKNSTIELEIRFQQINFLLFKTVYEALVAQEIPSTISHSIRCIKKVHH
ENHCREKILPSENLYFKKQPLMFFKFSEPASLGCKVSLAIEQPIRKFILDSSILVRLKNRTTFRVSEL
WKIELTIVKQLMGSEVSAKLAAFKTLLFDTPEQQTTKNMMTLINPDDEYLYEIEIEYTGKPESLTA
ADVIKIKNTVLTLISPNHLMLTAYHQAIEFIASHILSSEILLARIKSGKWGLKRLLPQVKSMTKADY
MKFYPPVGYYVTDKADGIRGIAVIQDTQIYVVADQLYSLGTTGIEPLKPTILDGEFMPEKKEFYGF
DVIMYEGNLLTQQGFETRIESLSKGIKVLQAFNIKAEMKPFISLTSADPNVLLKNFESIFKKKTRPY
SIDGIILVEPGNSYLNTNTFKWKPTWDNTLDFLVRKCPESLNVPEYAPKKGFSLHLLFVGISGELF
KKLALNWCPGYTKLFPVTQRNQNYFPVQFQPSDFPLAFLYYHPDTSSFSNIDGKVLEMRCLKREI
NHVSWEIVKIREDRQQDLKTGGYFGNDFKTAELTWLNYMDPFSFEELAKGPSGMYFAGAKTGI
YRAQTALISFIKQEIIQKISHQSWVIDLGIGKGQDLGRYLDAGIRHLVGIDKDQTALAELVYRKFS
HATTRQHKHATNIYVLHQDLAEPAKEISEKVHQIYGFPKEGASSIVSNLFIHYLMKNTQQVENLA
VLCHKLLQPGGMVWFTTMLGEQVLELLHENRIELNEVWEARENEVVKFAIKRLFKEDILQETGQ
EIGVLLPFSNGDFYNEYLVNTAFLIKIFKHHGFSLVQKQSFKDWIPEFQNFSKSLYKILTEADKTW
TSLFGFICLRKNGSGATNFSLLKQAGDVEENPGPMAGRVKIKQKELIDSTVKNKNVMNLFHEIIG
SKGNINFSVVWPKFKKIKQSVYDYISTLSVLEKANVMQNFEADKKLLELFVQKLWAAYEGYFK
YPEIEKYEVEGQVNFNLVPQCVLEKFSQLYRIRINSELVTLILNSCAFMSKYNDYILKKDPYILTIT
PGLCFSPIPNFEDLNFKHLYNSDKNSQHDKEFIMFILYKLYTAALGVYNAISIPDIDVEDLENIILSS
VSQIKKQIPRCKDAFNKIESSVHLLRKNFNTYYSDYVGSGYNPTIIMEQYIKDISQDSKNISPRISY
QFRTIIKYYRDMIATRHQTMDPQVLNLVKHVEKKLDMLDREKN
10. I329L-A224L-MGF505.6R-B175L
(SEQ ID NO. 111)
MLRVFIFFVFLGSGLTGRIKPQVTCKYFISENNTWYKYNVTILNSSIVLPAYNTIPSNAAGISCTCH
DIDYLQKNNISIHYNTSILKTFQDIRIIRCGMKNISEIAGGFGKELKFLDLRYNDLQVIDYNILRKLI
RSNTPTYLYYNNLMCGKRNCPLYYFLLKQEQTYLKRLPQFFLRRINFSNNNTFLYHFLSCGNKPG
HEFLEYQTKYCRTKFPEINITVNQLIAKKNTERYKSCYPLVFISILCSCISFLFLFICLLRSICKKYSC
TKQDKSSHNYIPLIPSYTFSLKKHRHPETAVVEDHTTSANSPIVYIPTTEEKKVSCSRRKGSGATNF
SLLKQAGDVEENPGPMFPKINTIDPYISLRLFEVKPKYVGYSSIDARNQSFAIHDIKNYEKFSNAGL
FYTSPTEITCYCCGMKFCNWLYEKHPLQVHAFWSRNCGFMRATLGIIGLKKMIDSYNDYYNNEV
FVKHQNRVYTHKRLEDMGFSKPFMRFILANAFIPPYRKYIHKIILNERYFTFKFAAHLLSFHKVNL
DNQTTYCMTCGIEPIKKDENFCNACKTLNYKHYKTLNFSVKLGSGATNFSLLKQAGDVEENPGP
MFSLQDLCRKNIFFLPNDFSKHTLQWLGLYWKEHGSVHRAEKDSIMIQNELVLSINDALQLAGE
EGDTDVVQLLLLWEGNLHYAIIGALKTEKYNLICEYHSQIQDWHILLPMIQDPETFEKCHDLSLG
CDFICLLQHAVKYNMLSILVKYKEDLLNARIRHRIQSLFVLACENRRIEIIDWIGQNLPIPEPDAIFS
IAVATRDLELFSLGYKIIFDYMQRQGIIQLTNGVRMVVLNRHISMAIDNGLLPFVLETLKHGGNIH
RALSYAVTHNRRKILDYLIRQKNIAPNTIERLLYLAVKNQSSRKTLNLLLSYINYKVKNVKKLVE
HVVNEKSTLVLKILLEKKENLVDAVLTRLVKHSTYFQVREFIQEFSISPEKFIKIAVREKKNVLIEA
ISEDIWENPTERITYLKQIVHTIKYESGRRFLVDIIHSIYQSYSLKHEDILKLATFYVKHNAITHFKD
LCKYLWLNRGTESKKLFLECLEIADEKEFPDIKSIVSEYINYLFTAGAITKEEIMQAYDALEGSGA
TNFSLLKQAGDVEENPGPMETNCPNILYLSGITIEECLQSKKTATDTLNTNDDEAEVEKKLPSVFT
TVSKWVTHSSFKCWTCHLYFKTVPKFVPTYMRENERGEIEMGVLGNFCSFSCAASYVDVHYTEP
KRWEARELLNMLYRFFTSQWISYIKPAPSYTMRKEYGGKLSEEAFISELHTLEESISSKHIFI
11. C475L-B354L-D345L-H124R
(SEQ ID NO. 112)
MTSLLKTDFNVSKYRLIAQKREANAVEIEAALEVVREFIIKKKLILYGGIAIDYALHLKGSSIYPEG
ERPDFDMFSPNHVEDAYELADILYEKGFKQVGTVRAIHVQTMRVRTDFVWVADLSYMPPNIFNT
IPTLTYKNLKIIHPDYQRAGLHLAFCFPFDNPPREDVFSRFKKDLQRYNLIEKYYPIPVVPVKSTYE
SKTFSIPFKQVAIHGFAAYALLYQTLNELRITCKVPEWKTEFPQPSYSYHKNDKNITLTVDMPKA
YPALVLATYNPEEVIKEMGLHLTEICEPYMDYSPPIFKTNDIHFFSTMFKELAISIIQDNLIVVSPQY
LLLYFLYGAFATPADKSLFLFYYNATLWILEKADSLLNIIQKQTSPEEFTRFANTSPFVLTTRVLSC
SQERCTFSPAYRISLANDVQQSQLPLPKTHFLSNSLPDVSTLPYNYYPGKGKDRPTNFSYEKNLLF
NIGGKCTPSAMGSGATNFSLLKQAGDVEENPGPMALTTHSGKLIPELQFKAHHFIDKTTVLYGPS
KTGKTVYVKHIMKILQPHIEQILVVAPSEPSNRSYEGFVHPTLIHYRLWLADKQKKNDNKGAERF
LEAIWQRQTMMSSIYSRVNNIDMLKTLYHKLPIDIQQKENKNIAKVECLKAEQTDQKKEEKITSL
YQQLLKKIIIQNIHMYKNLCLTEDEKFTLNYINLNPRLLLILDDCAAELHPLFTKEIFKKFFYQNRH
CFISMIICCQDDTDLPANLRKNAFVSIFTNASICMSNFSRQSNRYSKQDKEYVEEISHIVFKGYRKL
VYIREDEHRQHFYHSTVPLPTAFSFGSKALLKLCKAVYSKEVVIDKSNPYWSKFRLNFGSGATNF
SLLKQAGDVEENPGPMETFVRLFKDSPQQRSDAWHAIRRTQVGGSDLASVLGLNPYKSYYITLA
EKANLFKKNLNRAACSWGTLFERVSKDLLELFCQTTVIGDNIHIDGTYLGYPGHSNSPDGFCHLT
LGYTQQSWEIKTIFNNVRYEATKRIPVLVEIKSPFNRKIKNSVPSYYMPQIQSGLALSPPISMGIYV
EAMFRVCGIHQLGSNNETNTDIHPPESMLPLAWGIITICSTQEHTEAPQDFGTLDAETFRQLLETL
YQKDQYTIHYSMPYETACPEMPNVVGYFGWKVFIFQIIPVMKHPQFLKDKYPIIQQFLRDLHTIK
ASPSPMEMYEKICCSEESALSTEDIDNFTDMLTGSGATNFSLLKQAGDVEENPGPMNLEYVQVV
QKFNQVLLELTKKVCTVVGGSKPTYWYHHIRRVCSECPSMPMSMIGPYLNVYKAQILTRDKNFF
MNFDPAHNEYTFIIQKLKEAARNMPEDELEQYWVKLLFLLKSYIKCKPFIN
12. C315R-C147L-MGF505.7R-MGF300.IL
(SEQ ID NO. 113)
MDALLKEIEKLSQPSLQKENNDVCDLCFMQMKKISNYQLLCEECGQLKDWFEPEYNEKFTVYSR
LKIVGANSSYHQRDLDKANSSDYSSLQFHHILEELKSLNVKYMDAGQKPFPIQVLKETAHSYNQ
VQQHRVIRSITKLQILASILRSICLKLNIACTVADAARFTQLNTKGISRGMDLLRSLFVDNKITLNV
DLNPIDSFINSTYSALQIKQIHQELQEENVYNLKEIVKSFILYADEKNIGVDLNRRTVVIATMYNVL
RRAYYPIEIDTVVYQCKIRKNTITRALKMYEDYYSHFKSLYEQYHLNAAKKLIGSGATNFSLLKQ
AGDVEENPGPMADNDNEDLIMDDLVEEYVETEEENLVDSEEESEDKDEIVESPSICEGFVQASSQ
TLVIIPDNERITSNVLTTFEATRLVAVRAQQLAINGSTMLKKKYSSPIDIAKQELFNRKIPLLVMRC
IKVTPEGQKIVEIWNPREMGIPLLDGSGATNFSLLKQAGDVEENPGPMFSLQDLCRKNTFFLPSDF
SKHTLHLLGLYWKGHGSIQRIKNDGVLIEHDLTLSINEALILAGEEGNNEVVKLLLLWEGNLHYA
IIGALRTENYNLVCEYHSQIQDWHVLLPLIQDPETFEKCHDLSLECDLSCLLQHAVKYNMLSILV
KYKEDLLNVLFRQQIQGLFILACENRKLEILTWMGQNLPIPDPEPIFSIAVVTKDLEMFSLGYKIVF
EYMENQGLHLTQVVRMVMLNHHFGMVINKGLLPFVLEILNYGGNVNRALSYAVTQNKRKILD
HVVRQKNIPHKTIERMLHLAVKKHAPRKTLNLLLSYINYKVKNVKKLLEHVVKYNSTLVIRLLL
EKKKNLLDATLTRYVKDSTYFQVKEFMQDFSISPEKFIKIAVREKRNVLIKGISEDIWENPAERIR
NLKQIVCTIKYESGRQFLINIIHTIYQSYSLKPEEILKLATFYVKHNATTHFKDLCKYLWLNRRTE
SKKLFLECLEIADKKEFPDIKSIVSEYINYLFTAGAITKEEIMQAYALEYAMYGSGATNFSLLKQA
GDVEENPGPMVSLTTCCLKNIVNQHAYVENTVLLYHLGLRWNCKTLYQCTQCNGVNYTNSHS
DQCKNKDLFLIKVIVKKNLAVARTLLSWGASPEYARLFCRNTEEEQALNVQHVADVPSSKILER
LTMSYKGNDEQLLITFYLLNLSTNFSTNLREQVRFKIVSYIICDLAIHQTFKIFYAKNYSLSTLYCIF
LAIYYKLYTALRKMVKIYPGLKSFAYLTGFMFDDETVMETYNSTDDEISECKNRIITIKGYYGNIH
CRSDIDHMYAFSQNNFW
13. MGF360.6L-MGF360.12L-MGF300.4L-D205R
(SEQ ID NO. 114)
MNSLQVLTKKVLIENKAFSNYHEDDIFILQQLGLWWENGPIGFCKQCKMVTSGSMSCSDVDSYE
LDRALVRAVKKNQTDLIKLFVLWGANINYGIICAKTERTKVLCIQLGADPKFLDVGLYNMFVDLI
KQQKVLLAIDIYYDNISILDSFDSHDFYVLIDFIYNRFILNLDEKEKMIKNTYVLKFWFKIAIEFNLI
KPIRFLSKKFPHLDYWRLKTAVYLGNVDEIHHAYFQENIRLDPNDMMSLACMYPQNKLGIYYCF
ALGANINTALETLIGFINHEVNREITFFSNYGIWSNVHFCISLGANPYTKKIQETLLRQEKNVMMK
LLFKKGLLSPHSILHKKILEPSEVRKIISTYEYTETFHSFSSLRDNLRGSGATNFSLLKQAGDVEENP
GPMLPSLQSLTKKVLAGQCVPTNQHYLLKCYDLWWHDAPITFDHNLRLIKSAGIKEGLNLNTAL
VKAVRENNYNLIKLFAEWGADINYGLVSVNTEHTWDLCRELGAKETLNEEEILQIFIDLKFHKTS
SNIILCHEVFSNNPILQKVNNIKMRIEIFWELRELIVKTDLLNNEFSLSTLLLKYWYAIAIRYNLKE
AIQYFYQKYTHLNTWRLTCALCFNNVFDLHEAYEKDKIHMDIEEMMRIACIKDHNLSTMYYCY
VLGANINQAMLSSIQYYNIENMFFCIDLGADVFEEGTTALGEGYELIKNILSLKIYSPATTPLPKST
DPEIIDHALKNYVSKNMMIFLTYDLRGSGATNFSLLKQAGDVEENPGPMQSLFNIALKALTLKNH
VEFLKRDKEVLTRLGLCCKNYDLIHKCSECGNICPNGQQHGTCININYLLIYAVKRDNYMLAYR
LLCWGANEKFAHYFRRPLPNLKPLLPKKELTPKDIKQLAYEHFHSDSELITVFEVFRKSRNINDCL
EFFYKKNIEFEIYFARLYVYSKTFYRKSWYWFCIFMAVKHSMEHALKKITKTYIPTFYNKTTLPL
VLFLSACFYENVEWMKNFFYKANKKIQQKMLSYGMEWAATHGKVRTFVCCYTLGGTASLKM
YQKAYQNERYMIMALCSYLGNIQINNPWDSLNPYMMVQNKEKFLPLKFSEETQYFYIGSGATNF
SLLKQAGDVEENPGPMDTAMQLKTSIGLITCRMNTQNNQIETILVQKRYSLAFSEFIHCHYSINAN
QGHLIKMFNNMTINERLLVKTLDFDRMWYHIWIETPVYELYHKKYQKFRKNWLLPDNGKKLIS
LINQAKGSGTLLWEIPKGKPKEDESDLTCAIREFEEETGITREYYQILPEFKKSMSYFDGKTEYKHI
YFLAMLCKSLEEPNMNLSLQYENRIAEISKISWQNMEAVRFISKRQSLNLEPIIGPAFNFIKNYLRY
KH
14. MGF360.4L-MGF360.15R-A238L-H240R-B125R
(SEQ ID NO. 115)
MNSLQVLTKKVLIETKAFSNYHEDDIFILQQLGLWWENGPIGFCKQCKMVTGGSMSCSDVDSYE
LDRALVKAVKENQTDLIKLFVLWGADINFGIMCAKTKQTKDLCIQLGANPEFLDVGLYNMFVY
LVKRKKVLLAIEIYYDNILILDSFNSNDFHLLIDFVYNRFILYLDEKEEEMTRNTLVLKFWYKFAI
DFNLTKPIHYLSKKFPHLDLWRLQTAIYLGNIDEVHHAYFQENIRLGLNVMMFLACARPGNKLGI
YYCFALGADLDRALERLISFNSINREINRKIRGEKRLCIEGSYLSNVYFCIGLGANPYTKKIQEIIKQ
KHSNIMILLFSKKKILSPHSVLQNKILDPSDVHKMISTYKNTESFYPFSSLAVKLIQQANIGSGATN
FSLLKQAGDVEENPGPMNKIFLNITETINMVLIEFLTGFFYLYGKRLFSISKVMDMICLDYYTIIPA
PLAMMLAARLKNYDLMKRLHEWEISIDYALLVVDDVPSIDYCLSLGARSPTRAQKRELLRDNTF
NPVYKYLMNCSGFPTKREKNIPCDVQCERLQKNIIKELVFNCSVLLEMVLHTEREYAYALHCAA
KHNQLPILMYCWQQSTDAESILLKTCCSDKNINCFNYCILYGGAQNLDAAMVEAAKHDARMLI
NYCVMLGGRSLNEAKETAAMFGHIECAQHCFKLQSYVVDTSNTDDTDGSGATNFSLLKQAGDV
EENPGPMFPEREIENLFVKWIKKHIRNGNLTLFEEFFKTDPWIVNRCDKNGSSVFMWICIYGRIDF
LKFLFEQESYPGEIINPHRRDKDGNSALHYLAEKKNHLILEGVLGYFGKNGTRICLPNFNGMTPV
MKAAIRGRSLNMLSLIKFGADPTQKDYHRGFTAWDWAVFTGNMELVKSLNHDYQNLSTCISLF
TSWMFSTGGLRKSPKLLLLAVNIMSMKNFLNRIQSSCVGSGATNFSLLKQAGDVEENPGPMAAN
IIATRAVPKMASKKEHQYCLLDSQEKRHGHYPFSFELKPYGQTGANIIGVQGSLTHVIKMTVFPF
MIPFPLQKTHIDDFIGGRIYLFFKELDMQAVSDVNGMQYHFEFKVVPVSPNQVELLPVNNKYKFT
YAIPVVQYLTPIFYDLSGPLDFPLDTLSVHVDILSNHIQLPIQNHNLTTGDRVFISGYKHLQTIELCK
NNKIFIKNIPPLSSEKIKLYILKNRIRIPLYFKSLKTSKGSGATNFSLLKQAGDVEENPGPMAVYAK
DLDNNKELNQKLINDQLKIIDTLLLAEKKNFLVYELPAPFDFSSGDPLASQRDIYYAIIKSLEERGF
TVKICMKGDRALLFITWKKIQSI
15. NP1450L
(SEQ ID NO. 116)
MKFYYVFSKNMEAGYAEIAAVQFNIAGDNDHKRQGVMEVTISNLFEGTLPAEGGIYDARMGTTDH
HYKCITCSHQRKQCMGHPGILQMHAPVLQPLFIAEIRRWLRVICLNCGAPIVDLKRYEHLIRPKRLIE
AASSQTEGKQCYVCKAVHPKIVKDSEDYFTFWADQQGKIDKLYPQIIREIFSRVTYDTVVKLGRSKN
SHPEKLVLKAIQIPPISIRPGIRLGIGSGPQSFFIDINNVIQYLVRKNLLIPKDLQIVRGQKIPLNIDRNLQT
IQQLYYNFLLDSVSTTATQGGTGKRGIVMGARPAPSIMRRLPRKEGRIRKSLLGSQVWSISRSTICGN
SDLHLDEVGYPISFARTLQVAETVQHYNINRLMPYFLNGKRQYPGCSRVYKQITQSVHDIEGLKQDF
RLEVGDILYRDVVTGDVAFFNRQPSLERSSIGVHRIVVLENPKISTFQMNVSACAWYNADFDGDQM
NLWVPWSVMSRVEAELLCSVRNWFISTKSSGPVNGQVQDSTVGSFLLTRTNTPMGKNVMNKLHA
MGLFQTTQTDPPCFANYSPTDLLDGKSVVSMLLRQTPINYQRAPTWYSEVYAPYMHYNKQDISTQI
RNGELIEGVLDKKAVGAGSSGGIYHLISRRYGPQQALKMIFATQQLALNYVRNAGFTVSTADMLLT
PEAHQEVQEIINELLLESEEINNRLLHGDIMPPIGLTTHDFYEKLQLNALKFPDRILKPIMNSINPETNG
LFQMVATGAKGSNPNMIHIMAGIGQIEINTQRIQPQFSFGRTLVYYPRFALEAQAYGFICNSYIAGLT
SPEFIFGEMNGRFDLINKALSTSSTGYANRKAIFGLQSCIVDYYRRVSIDTRLVQQLYGEDGLDARQL
ETVRFETTMLSDQELEDKFKYTGIQSPLFEEEFSRLKKDRDKYRQIFLNVENFNFSQLLTDVRQVPVN
VASIVKNILLSSTSGVLPFDEKSILQKYAMVKTFCKNLPYVFINNIQERLQTPIPVYLKRAASLMRMLI
RIELATVKTLNITCEQMSAILDLIRLQYTQSLINYGEAVGILAAQSVSEPLTQYMLDSIIHRSVAGGTN
KSGIVRPQEIFSAKPVEAEQSSEMLLRLKNPEVETNKTYAQEIANSIELITFERLILQWHLLYETYSST
KKNVMYPDFASDVEWMTDFLENHPLLQPPEDIANWCIRLELNKTIMILKSISLESIINSLRAKHPNTY
IMHSVENTASGIPIIIRIYLRESAFRRSTNTRMATDEKIAVNVVDKLLNSTIRGIPGIKNANVVKLMRH
RVDAQGKLVRLDNIYAIKTNGTNIFGAMLDDNIDPYTIVSSSIGDTMELYGIEAARQKIISEIRTVMG
DKGPNHRHLLMYADLMTRTGQVTSLEKAGLNAREPSNVLLRMALSSPVQVLTDAAVDSAVNPIYG
IAAPTLMGSVPRIGTMYSDIIMDEKYITENYKSVDSLIDML
16. G1340L
(SEQ ID NO. 117)
MDFQNDFLTNPLRVTLYNPVENEYTKTFIFLGSVPANVLQACRKDLQRTPKDKEILQNFYGEDWEK
KLSQYVVGGDSDDLDEFEKLFVEDRGEETNVMMPEIETMYSEYSIFPEDTFKDIREKIYVATGIPPYR
QHIFFFQNNALQVTYRLLLSGSGVALDIRDYKKEFQQVGGVNIDASMESQKDELYVEALDSFQLIK
NIHHIFVADLNTLVAPMRRQISIAIEDNYQFDLLYYGLIMKYWPLLSPDAFKLLVQSPLQMEKQYPA
LSPSLTSLKKRLLLEQKLINFTYARAQQVIAKYEGNRLTRGTLAVTSAMIKISPLVNIQINVRNVFDLF
PATPDIPQLVVFFYSKTGPTVVSKHHITSTEPEKFSNKTFRVPTIILIRFINKKAFILTIQNNGHYFIESN
WSENERHDFNSVVSTLNNFINPIIHTINDMGPAAFPRGGSLPLPSNEDIQISISSMSVSTFWPYTLSSKG
FTELKSRWREYEQAGIISVRGLQQTGVYNFLFKKGIYSYDPHEIERMIIISSGPGRKMDINVALLQNT
YAYLFDTNVAARWETIYGGRNIRIYHRVTDIKIEMFNITQEEFNYLWVYLFVFLDNLITGPDKILVNK
LSQLHDKQQGKGASQLRALQEQDPDLYDLRKYDTQATVYSVLCQHPRPPVIYSEAEVKSMPPAKR
KELVKYWNFTEGVPAYYSCPHPDYPHLSLLEGRHPLNYCLPCCQKTKALLGTKRFYINNTCLTKHT
FVEQDLEDLNTQTSRHTLSYGKKIPVNRIAFLPHQIADELFLNTIKEPDIFCIVGVEQTMLGISNAGLF
YSLARILDLAPKALAIEIAKAANTPQYYILGNGAGNMFSSGAELANLILQTFVEQKNQLLQWDTTW
QDIFLDLVAICYDLHCVFFKDKQGDIGFEVSPSTIQKILSPSKKIAIIFDTDEGIYPMAITQQKRFLKNSE
AQYIFTEDDPVMEVIQSMSEFMCKDNWWDIHDVKNIPGYTVGKKLINRHNFCYALLIDSDTDRPIYF
PIRLSSYIHDDIPIDFDLRPTQIASFEETWKFITLFNKQYKQYEIVPSAVLQNIKKEFVGFLSEGKTGLY
FYYAPTQTLPATLEKLPIATLTIDPRDIDQAILYPLEEPYPQQNKANKAFYINHLYKFLLIEFFDVLYG
LQSNSTRKHIENLFQKTDFQKITSVTEFYTKLSDFVDLNDIHTIKHILETTDAEHALKVLQKNIFNFDY
TLLSPLQSYTYDELCQHLKKLLTPRIEFYEDIETIDRGLINIYTSCQYSTLNQPQCKKKRLRIPVNHFE
NYIHILAADILNPLKHSTLLLTGLGVIDDLQFILRPQEIISVKNKF
17. M1249L-A118R-I73R
(SEQ ID NO. 118)
MEEVITIAQIVHRGTDILSLNNEEIEALVDEIYSTLKGSNDIKNIRLIDFLFTLKDFVNHVRAEQSKLPD
LSMPIEAYIRQLLVDPDVVPIVSEKKKELRVRPSTRKEIFLINGTHLAVPAEAPIEIYGLKLRLKTFSPQ
CFMRMAEIGSFSPETLGYVASGANLTNFIRVFMKCVDQETWKKNGEGVVVTTKENIIQFTHQYIEL
YKFLRSGGHSWLINRLAEEMVHRKLDREDQGSHISNIVETEEIEPEENIKRVIFFLKELSTMYSVSPVF
TSGYMPLLYDLYRAGYLEVLWNPVEQKFLQHAEQREKEQMILQQVDMKLTEVITQARQYFKIMEE
KIGRVQSDAIREILTMEGKVDDPNSILQEVIKACGKQEAELITTEYLNIKKQWELQEKNACAHLKLV
KQLRSGLQYAELLKVLESIRVLYKEKNNTTNWNLCKACGFKLLCPHVDMLIQLQAAEASYDTMRT
KLMKFSGINKEKENNQGLIYSYFCKICGEELAHFIQEDRTADVGIIGDLNSKLRVFIWQETMKACTFI
HFGKLVDVKQFANIAVNVCLPLVYSIENIKKEEDYDPLTQLYAVIYIYAYILNLIYSSQKNKEFLTITI
HGMKADSSLNAYVTFLLEKMMQQYSGIINQLSEITDQW1ANNFREAFKKIIHQNGLQGLSVQDDTK
VLLTEILLDPMYDYAATVARIDGSIPMHKPRTPKEAEYEFKTVIGRTPAELLSQKEFYDKIYTSKYRP
DFTQLTRLNDIYFQEESLRVWWGGRDEEKTSTLIYLRAYELFLKYLQNAPNFNSELAEFKTYENAY
GEQKALLAQQGFYNIFDPNTGRADQRTRLFEYKRLPISTLYDERGLPHKWTIYVYKAVDSSQKPAEI
EVTRKDVIKKIDNHYALADLRCSVCHVLQHEVGQLNIKKVQTALKASLEFNTFYAFYESRCPKGGL
HDFQDKKCVKCGLFTYIIYDHLSQPELVHDYYNNYKDQYDKEKMSIRSIQIKKDMTTPSTETQPKPP
QEPWTFDYGKIIKTAKILDISPAVIEAIGAMEGRSYADIREGQGAPPPPTSMDDPRLMAVDSAVRIFL
YNYNCLRHVSTFNKPPIHVERLVKHLSYEEKEDLEKVLPNVVNEYHTTFKHLRVTDPASALLYSIEF
LCISFLTLYEIKEPSWVVNIVREFALTELNTIIQSEKLLSKPGAFNFMIFGEDFVCSGEDSSMDDISAYS
SPGLFGEDIIDRLDDPFSIEDVDISLDVLDNLAPQMHSNVSFNFIACVLFPTPLIPSMAMSIPRMINKRK
KRIQFLTFLTNLFLYNIVQHCISGIMETQKLISMVKEALEKYQYPLTAKNIKVVIQKEHNVVLPTGSIN
SILYSNSELFEKIDKTNTIYPPLWIRKN
18. EP1242L-I9R-C62L
(SEQ ID NO. 119)
MEPLRPQITYGPIETVDNEELTEADMLSFISAAVNSTGLIGYNIKSFDDLMDNGIPQIVKQMFNVDIT
YKDQRDHTEIDKLRESVQIQFNFTDVNIERPQHRNYSQGNKINLLPNKARLCGLSYSGPVNLAAEVI
LTAHYSNGRQEVKRASIPPFQVSTFPIMRGSNRCHTHHLSKTAKKEIGEDPNEPGGYFIARGGEWVV
DLLENIRFNTLHIHYHTMQQGNNEIIRGEFISQPGGAFENSSQIIIRYMTTGAMEINSTKFSKLRIPWY
LIFRMFGMTGDDSIIEQVVFDLESNSLVNTFMIEILEKSIHVLDPIFQPVQHELNREKIIQFLSEKVSKF
VSNPSAYKSDENAVQYLNERQLTILDKILLPHMGQTADTRVRKLRFLGLLIHKILLVIMNVFPPTDR
DSYRTKRVHGSGVSLAKAFKAIFNTSVIAPIINGFKELLKQTAFEELTQRNIIEAFSAALSKNTASDLN
RSMEQSIISGNKTIMVRQRPIVNRVSTQSLERKNLLNTISALRTVNTHNTTNASKQTERADMMRRVH
ASYPGYICVAQSADTGEKVGMSKQLAITANVCTAGEVLSLKQRLLSDPAIQQLADVSNKDIVRKGL
ARVFINGEWIGCCTNAFELAQRYRMLRREGKVVHPHTTIYWDSMVDEVEFWLDVGRLTRPLLIVD
NNIEKYNQACYKAAEARKKGDKDWEKHKIPFIQNTRFTPQMAKDILAGTLTLEDLVAQGICEFITPE
EAENCLVAFSIIELRKHKFIDVTRRFTHVDVPQAILGLAALVSPYANCTQPARVTYETNQGRQTGGW
YCFSWPYRVDMNRFFQFYNEMPLVKTIAHNYVIPNGLNTIVAYMIYGGYNQEDSVIVSQSFIDRGGF
AGTFYREEKVELESDIESFGKPDPLITKNLKPGANYEKLVDGFVPVGTVVKKGDIIIGKVAKIRGEKD
ELNKYIDRSVMYGFDEPAVVDAVMRPHGPNDEIFGLMRLRYERNLNIGDKMSSRSGNKGIAALALP
TSDMPFTEDGLQPDLIVNPHSFIPSRMTNGQMIETTVGLANALQGVVTDGTAFLPINVQLLSERLAQE
GLRFNGCQKMFNGQTGEYFDAAIFIGPTYHQRLQKFYLDDRYAVASYGPTDALTGQPLDGKRSHG
GLRLGEMEHWVLTAQGAMQTIIEKSFIDDSDGCISYICRNCGEPAIYNASHPIYKCMNCDVQADIGM
VDSRRSSIVFQHEMRAANVNITSVLSPRVFQPAMGTFSVTASAKNDNAVCKYLKEPMVENKNYKNI
LRNEFIDKKNLNDALRQHITVHNPVVDWCNNYSTFSSQDFEEYKIYIHSDLMDGRPSPKKTWCVILM
NWGSISSGTPGLFVESIRNTPSVVKINVIFLKVISNTAVSVFWRDRRIRFESDWLNSYFQK
19. G1211R-I7L-L83L
(SEQ ID NO. 120)
MISIMDRSEIVARENPVITQRVTNLLQTNAPLLFMPIDIHEVRYGAYTLFMYGSLENGYKAEVRIENI
PVFFDVQIEFNDTNQLFLKSLLTAENIVYERLETLTQRPVMGYREKEKEFAPYIRIFFKSLYERRKAIT
YLNNMGYNTAADDTTCYYRMVSRELKLPLTSWIQLQHYSYEPRGLVHRFSVTPEDLVSYQNDGPT
DHSIVMAYDIETYSPVKGTVPDPNQANDVVFMICMRIFWIHSTEPLASTCITMAPCKKSSEWTTILCS
SEKNLLLSFAEQFSRWAPDICTGFNDSRYDWPFIVEKSMQHGILEEIFNKMSLFWHQKLDTILKCYY
VKEKRVKISAEKSIISSFLHTPGCLPIDVRNMCMQLYPKAEKTSLKAFLENCGLDSKVDLPYHLMWK
YYETRDSEKIADVAYYCIIDAQRCQDLLVRHNVIPDRREVGILSYTSLYDCIYYAGGHKVCNMLIAY
AIHDEYGRIACSTIARGKREHGKYPGAFVIDPVKGLEQDKPTTGLDFASLYPSLIMAYNFSPEKFVAS
RDEANSLMAKGESLHYVSFHFNNRLVEGWFVRHNNVPDKMGLYPKVLIDLLNKRTALKQELKKL
GEKKECIHESFIPGFKELQFRHAMVDAKQKALKIFMNTFYGEAGNNLSPFFLLPLAGGVTSSGQYNL
KLVYNFVINKGYGIKYGDTDSLYITCPDSLYTEVTDAYLNSQKTIKHYEQLCHEKVLLSMKAMSTL
CAEVNEYLRQDNGTSYLRMAYEEVLFPVCFTGKKKYYGIAHVNTPNFNTKELFIRGIDIIKQGQTKL
TKTIGTRIMEESMKLRRPEDHRPPLIEIVKTVLKDAVVNMKQWNFEDFIQTDAWRPDKDNKAVQIF
MSRMHARREQLKKHGAAASQFAEPEPGERFSYVIVEKQVQFDIQGHRTDSSRKGDKMEYVSEAKA
KNLPIDILFYINNYVLGLCARFINENEEFQPPDNVSNKDEYAQRRAKSYLQKFVQSIHPKDKSVIKQG
NVHRQCYKYIHQEIKKKIGIFADLYKEFFNNTTNPIESFIQSTQFMIQYFDGEQKVNHSMKKMVEQH
ATASNRAGKPAGNPAGNALMRAIFTQLITEEKKIVQALYNKGDAIFIDLLTYIINNINYKIATFQTKQ
MLTFEFSSTHVELLLKLNKTWLILAGIHVAKKHLQAFLDSYNNESPSRTFIQQAIEEECGSIKPSCYDF
ISMGNHPIKQDMKTCDYYHGEKKLKYMRRMLYNEPLGTYAVSSLFGCDMIVLTWNCTISGRTLHR
RIHTRFGQYYHNNCYYTKIDDIIGDYPDTFYRPLYRYKPMDTSLKNNDGALEADNKNYQDYRAEP
DKTNDVLDVTKYNSMVDCCHKNYSTFTSEWYINERKYNDVPEGPKKAVVHRCTIL
20. P1192R-EP152R-E66L
(SEQ ID NO. 121)
MEAFEISDFKEHAKKKSMWAGALNKVTISGLMGVFTEDEDLMALPIHRDHCPALLKIFDEIIVNATD
HERACHNKTKKVTYIKISFDKGVFSCENDGPGIPIAKHEQASLIAKRDVYVPEVASCHFLAGTNINK
AKDCIKGGTNGVGLKLAMVHSQWAILTTADGAQKYVQHINQRLDIIEPPTITPSREMFTRIELMPVY
QELGYAEPLSETEQADLSAWIYLRACQCAAYVGKGTTIYYNDKPCRTGSVMALAKMYTLLSAPNS
TIHTATIKADAKPYSLHPLQVAAVVSPKFKKFEHVSVINGVNCVKGEHVTFLKKTINEMVVKKFQQ
TIKDKNRKTTLRDSCSNIFIVIVGSIPGIEWTGQRKDELSIAENVFKTHYSIPSSFLTSMTKSIVDILLQSI
SKKDNHKQVDVDKYIRARNAGGKRAQDCMLLAAEGDSALSLLRTGLTLGKSNPSGPSFDFCGMIS
LGGVIMNACKKVTNITTDSGETIMVRNEQLTNNKVLQGIVQVLGLDFNCHYKTQEERAKLRYGCIV
ACVDQDLDGCGKILGLLLAYFHLFWPQLIIHGFVKRLLTPLIRVYEKGKTMPVEFYYEQEFDAWAK
KQTSLANHTVKYYKGLAAHDTHEVKSMFKHFDNMVYTFTLDDSAKELFHIYFGGESELRKRELCT
GVVPLTETQTQSIHSVRRIPCSLHLQVDTKAYKLDAIERQIPNFLDGMIRARRKILAGGVKCFASNN
RERKVFQFGGYVADHMFYHHGDMSLNTSIIKAAQYYPGSSHLYPVFIGIGSFGSRHLGGKDAGSPR
YISVQLASEFIKTMFPAEDSWLLPYVFEDGQRAEPEYYVPVLPLAIMEYGANPSEGWKYTTWARQL
EDILALVRAYVDKDNPKHELLHYAIKHKITILPLRPSNYNFKGHLKRFGQYYYSYGTYVISEQRNIITI
TELPLRVPTVAYIESIKKSSNRMTFIEEIIDYSSSETIEILVKLKPNSLNRIVEEFKETEEQDSIENFLRLR
NCLHSHLNFVKPKGGIIEFNTYYEILYAWLPYRRELYQKRLMREHAVLKLRIIMETAIVRYINESAEL
NLSHYEDEKEASRILSEHGFPPLNHTLIISPEFASIEELNQKALQGCYTYILSLQARELLIAAKTRRVEK
IKKMQARLDKVEQLLQESPFPGASVWLEEIDAVEKAIIKGRNTQWKFHMYSILIACLVLLLCLVIYV
GHRADHARKYLEGMWHGDPVFLKQSGLQSFYLYIQPDHTCFFSIVNKNGEKLMETKIPCTITNKIY
MFFKPIFEFHVVMEDIHSYFPKQFNFLLDSTEGKLILENNHVIYAVLYKDNFATALGKTVEKYITQN
MHISIITRYTLKYIYMHLTHNHILFTYIMRIYLIKHNHMLFTTHVYTYIM
21. D1133L-E165R-C122R
(SEQ ID NO. 122)
MAYPELDAADFLQQLARRKEFKSLISPPVDQKELIRDLRAHFVQIGGPGCEKGGRAFFPCDPYASPF
PSIKGLQLHNAQLFVQNFQNPNTPYSRLLLNWQTGTGKSIAAIAIARQFMNHYMNFIENAPWIFVVG
FIRAIIQTEMLRRPELGFVSYKEVAELHRLLHIAKQSGSTTSVESRHLNGFVSTLKRRLTDRNRGGFF
QFYGYKEFASKLFNITSKGEEKNFDVLSLFHRSDEAEDTLNENDISQFVQKISEAETNGLIRVNQKIM
EQLRGGLLIADEIHNVYNIQERNNYGIALQYVLDAFPPHQAPRAVFMSATPVTGSVMEYVDLLNLL
VPRHELPNGQPLQRQQLFDSSGHSVKWKKDALALVERLSTGRVSFLLDTNTNFYPERIFAGKMLSY
KDETLPYLHFIECPMSEYQLETLKQLGPDPKISSNAYSIYDMVFPNPKFSKQTEPKAYGLFNSTETPT
ALSMASTDWLLENGVQIIEPSRRAPFNVSGSFLSLQPPTHISGLAFYSGKYTQMMKDILSIIRQGRGKI
LIYHNRVRMSGVLILQEILQSNGILNEVSSPVGTTRCSICAAIRDEHTHSDHQFIPVRFTILHSEIEPAVR
ERSLALFNASSNLEGHQLRILIGSKVIVEGLNFQAVRYEMIMSLPLDIPRLIQVFGRVVRKNSHMELP
PSERNVTIYLYVSTTPDGGPELAKYAQKLKEYILIQEGDKALRKHAIDGFTNQIKIDKPMLESLPLSPS
ITPANVGATVLNTFEAYGYGEQEVKTISNIIISLFMARPVWTYSELWKAVSTPKLIQGMDNKLFSED
NFALALISLCYSKNQCKELWIQNRLCTIMHVPAKPEHLYVAAVLNHKKEPVLDIETYIRDFQPPAMH
SIRITKYLEHSQTKEPFQVLYEKFQKDFQDEPMEQVLIHYPASFHYTMLEALIIDNLAGMGALVEVY
KKFFIAFSKKDIQPFPDIFKIISHVPGDDNTLVGYATEDSVRLITSREDKTWHEIPLYMLNINVKRKEN
DIVIGYMESKGKALKFKIRPPIQVLKKNEITDIRMLNRGAVCETRGREEQQKIADQLGISLNLTKISAI
KLCLLIRNNLLQKEMEARNQPNGMQDGIRWFYLFNDKMPSLVHTSMATNFFIQPITEEAEAYYPPS
VITNKRKDLGVDVYCCSDLVLQPGLNIVRLHIKVACEHMGKKCGFKIMARSSMCTHERLLILANGI
GLIDPGYVGELMLKIINLGDTPVQIWAKECLVQLVAQGDHVPDHINILKRNQIFPLFAPTPRGEGRFG
STGEAGIMRTMKICKACSSCMVRTYVDGNIIFRCSCGESVQGDSQNLLVSSKVYHTGEMEDKYKIFI
KNAPFDPTNCQIKKDCPNCHLDYLTQICIGSQKIIILVCRCGYMSNRG
22. F1055L-E146L-I8L
(SEQ ID NO. 123)
MQETFKFLRCNSQGEAVEDKYSLETLKNHFVVRDEYNNLFRVFSSRDDFWEWEAAQPFEQKCFHE
VVFGFLPQRLKFDIDFPVNKSYSDDNVDDNDNVEDNVYDILDMIINVIMDVFYETYSLPYNINLTRE
QILLTDSIGLNKKRELKYSFHIILYTYSVLNNNEAKVFTSKVLENLPKHVYPFVDPQVNKSIQNFRIIG
SHKKGSMRVKMFNEELAEVFETSTTIKKSDTLIATPFETTCLPCIFTNVKETTPSSCDTIQQSELEEVL
KFAGTLCKNHCFLRVHKNLVLFKRTSPSYCEICKRMHDKDNTLILRVTGNKVYQHCRHDNKHSLL
MGSLSGTNNFVETYVDQVMTKSIEVHESILFEELPDTQKHIYDESSMREYERVPTLVVKAQMKIGKT
VQLRNYLQKYYGNNSISKQQTIRFVTFRQIFSKNIQSRLPNFTLYSEVTGDLDSYERVIIQVESLFRLT
STAEPVDLLILDEVESIFNQFNSGLHKYFAPSFAIFMWMLETANYVICLDANLGNRTYNILQRFRGD
VPIFFHWNQYKRAQHDTYYFTSSRETWLNNLLKDLLEDKKIVIPTNSLMEARLLQSFIQKKFPEKKI
GFYSSKSTAHERESHFNNVSYYWGLVDILIYTPTISAGVSYEDKRFDVLYGFFNNMSCDVETCCQM
LGRVRELKSKCYKICLQGKQNYYPETIEDIEMFTLQKRDTLFQTISNHQLSFTYSKETGRPIYYKTPY
YFILWLETMRIQHLSKNHFITRFINQIADTGAKVFILTGEKLETVKQYTSIKMEIKHQDYVNIASAETI
DANKALQIKQNLKEGITVDQQDLFAYEKYKLLEFYAWHGHKITPKFVEQYNSFMTKQNYTGRVQI
SRGKTVYESLTMLQTQELNFHQWAMQHAEHHDLQFNYSFQSHMYAIMLLTKCGFKCVQDPNILTN
EQLMTKLVDEFVQYDLSAISFEFKLKKPNKTDPQTILKFINKVLGLRYGLKIHHNKGNYYIKNTKAG
SLIPFVRQQIKQSPCVVSNLLPITETSSAKEETSPIKEETFTETMGGTTDFVLSITIVLVILIIIAFIWYNFT
GWSPFKYSKGNTVTFKTPDESSIAYMRFRNCVFTFTDPKGSLHSIDVTEVLNNMAKGFRDAQNPPSS
FTLGGHCQAPLNAFSFVLPGVNDRATVATADEAKKWENCDATLTGLQRIIMGNRLIKKDLKKCEY
YYGEQQNLKQIWRLLFNEPLGTYVVSSFLKKNYVVISFSCPTNTRIMHLRINICYDLYCINGEYYEKI
DDFIRLYPHIFYRPLYRYKS
23. B962L-H233R-H171R
(SEQ ID NO. 124)
MGKPILLEPGHLYNVPAEHKNDVPIHYIITWIKQRLPEFGGAIPTSLADRVLIIKSRTGSGKSTALPVH
VFRILRNENTHSFQKYLGRSVICTQPRVLTAVTLAKDIGASTHYPDMILGQTVGYQTKPLTEKPNRG
LIYATAGVLLAQLHTMTDDEIASRYAFMIIDEAHERALGIDLMLMYIKSMLQRMLQRGSIGALRIPF
VILTSATIDTHKYSTYFGIGKENIILVEGRQYGVETHWPLYNTNNYIKTACETALTIHKENIHDRPTEA
DILIFMPGMAEIRFLSMLLNNANMDLAKEKLPLMLILPIDSEAIAQENEAYLGLKAEIKNLWVKNPL
TAKVEKPLRRVIVSTVVAETGLTIETLKYVIDPGWNRSIETYYPEWAGGLITRPAAQSRIEQRKGRVG
RVFPGHFYPLYTKHVFEQIPVQQYPEIITEGPGAIFLSIVVETIKKNKEGVFKAEEIDMLDPPPTDALAS
AIERAIVAGLLTRGEKGLQLTQLGDIASRFSFLSIEEARMCFSGYFWQAAISDIATILAVVSVADKKLT
NLLDSKQRNGAMLAEAVLAGIPPFLQNIDNAYTNIHLLLADDLLEGLFIFEGFQHAIVYFINNKVNN
VAKHLREWCEKKMLKYSSMVQILARREDILNELAIVGLNPFHQWQNRLASANAETFLKRVCTLKQ
CMYEAYRLNCFCYDEHRLLYTGRNGIHFSYHDAVIKNPSCIVTPRIMLSPVSKQYMEWRLEPSFVSV
LDGFVNVDINFLLPRQEIPNILGGVENEEEEPPLPIQVFLHKYVKTHFHFSGKSFKELKMKPSQMIKFP
ETTLINMIPDIPKNVVQTYLEINVCHRYSFKRLIYCETFYTDMDDVQHENSVELIGLPMAAHHLTIND
FNKLYFILLKPDGFLIMYDLHQGQEAFWLHSLQDALGHHTIRRDMDFHTIPEWETIFKECGFTPIFSK
QPSEHELFIVFKKMILIASPFSLAHLEYLHTWHVTIKNIAQQHGLDIKVAIVVSTSHLNNFLPISGALNI
ECITFPSCGIKEIDLLWARIKLFQHYCAIGARLLWLVSADIRPPVSAWPAIADSLKKGADAVVIPYPSR
WNNLIPTVIKEIVVHQKKCLVAVDARHLDTDTQIVGAGMGCIVLTLKALMVRLSIGKQPVKILWPD
LHGTAEGIPLEGVEVGWFLNAYAFIKLNIRCLGADHIAQHLTMVVYDLLVSLSKESIDVLRFVEANL
AAFNQQYIFFNIQRKNSITTPLLITPQQEKISQIVEFLMDEYNKNNRRPSGPPREQPMFIPLLPYQQSSD
EQPMMPYQQPPGNDDQPYEQIYHKKHASQQVNTELNDYYQHILALGDEDKGMDSMLKLPEKAKR
DSDDEDDMFSIKN
24. C962R-MGF505-3R-C147L
(SEQ ID NO. 125)
MREESWEDHDTIQLTAQRKYLAEVQALETLLTRELSVFLTEPGSKKTNIINRITGKTYALPSTELLRL
YEHLEQCRKQGALMYFLERQGTYSGLMLDYDLKLNTNAVPPLEPPALSRLCHRIFVHIKNSSVLPE
GSHKIHFFFTLKPEVVQGKYGFHVLIPGLKLAASTKKSIIGSLQHDATVQKILHEQGVTNPESCLDPH
SASVPSLLYGSSKLNHKPYQLKTGFELVFDSSDPDYIPIHQIKNLESYNLVSELSLTNEQGSLVRPVYC
AADIAAEKEEEIPTEDHSLSILMLHDPEARYLHKILNLLPPEYYVEYPLWSNVVFALANTSANYRPLA
EWFSQKCPEKWNTGGKEKLEKLWNDASHHTEKKITKRSIMYWAHKHAPQQYKEIVEQGYFSILAE
YVYSYNGMLEHYMIAKVIYAMMGNKFVVDVDSNGKYVWFEFVLPGQPMNQGEIWKWRKEVNP
DELHIYISENFSRVMDRITEHIKYHLSQPHESNILNYYKKLLKAFERSKSKIFNDSFKKGVIRQAEFLF
RQRSFIQTLDTNPHLLGVGNGVLSIETIPAKLINHFHEHPIHQYTHICYVPFNPENPWTKLLLNALQDII
PELDARLWIMFYLSTAIFRGLKEALMLLWLGGGCNGKTFLMRLVAMVLGDHYASKLNISLLTSCRE
TAEKPNSAFMRLKGRGYGYFEETNKSEVLNTSRLKEMVNPGDVTARELNQKQESFQMTATMVAA
SNYNFIIDTTDHGTWRRLRHYRSKVKFCHNPDPSNPYEKKEDPRFIHEYIMDPDCQNAFFSILVYFW
EKLQKEYNGQIKKVFCPTIESETEAYRKSQDTLHRFITERVVESPSAETVYNLSEVVTAYAEWYNTN
INVKRHIALELSQELENSVLEKYLQWSPNKTRILKGCRILHKFETLQPGESYIGVSTAGTLLNTPICEP
KNKWWEWSPNPSAPPEKEASAPTPMSSSLQELCRKKLPDCILPEFFDDYVLQLLGLHWQDHGSLQR
IEKNQILVQQEPIHINEALKVAASEGNYEIVELLLSWEADPRYAVVGALESKYYDLVYKYYDQVKD
CHDILPLIQNPETFERCHELNSTCSLKCLFKHAVINDMLPILQKYTDYLDRWEYCSQMLFELACSKK
KYEMVVWIEGVLGVGKVTSLFTIAISNRDLQLYSLGYSIILENLYSCGQDPKFLLNHFLRDVSIKGLL
PFVIKTIEYGGSKEIAITLAKKYQHKHILKYFETWESMADNDNEDLIMDDLVEEYVETEEENLVDSE
EESEDKDEIVESPSICEGFVQASSQTLVIIPDNERITSNVLTTFEATRLVAVRAQQLAINGSTMLKKKY
SSPIDIAKQELFNRKIPLLVMRCIKVTPEGQKIVEIWNPREMGIPLLD
25. A859L-B318L-B169L
(SEQ ID NO. 126)
MCAGFYVAVHPWLEAQSLHKVGHTGNLAARLHDGSYTTCFTDEWKYCFTLETSTKKDAQKIEAG
VLYCAQFFRVKNKELVCLLPEKIKQLAEDVANCLDISYTLCDSPAYEMNDSTIVVEPSLPSDPLISKE
KLRHLVITPVEDEHFADDVLFFSTDETRTAIEDRLYQKEAANMGYQELRRSGRAILQMACRCGKTR
VAYLILSNYLQGKVLYLVPGLSLLRQTLEKLYQYGISLKNVLLVGSDQTRIVLNHDNIEMTTNPVFI
AKRIREAPSLLVIATYQSSTLLVDDFDLIISDECHRICGEWETRPFTHVLLNFKKGHRLFLTATPRYDT
PLSMKNRELFGGVAFRYYLREGIEAGYVNDFELQMVAAPKLAHQPSTKEETTKQIIVKQIIMALAYL
KTNIPAPKMLVFTRDIKQAKELYAALVDQGVYALIAHSTLPRQVILKTFTEFCSSKEPVILLNCRLFQ
EGVEVPELNAVFFAAPRHSPRDIIQSICRPLNKQVQKPHATIFLPLEVNTENVCLDRFSSIIPFADALAS
EDPRFYEHLLNPSEVAYPINWIGAHGSVSELLQLARHAIRYGTQGKIDRLTRSERLPWKAAFAELKR
TVEICCRYPKINDGFHFGGATLRFDTWYKWVIKSYLQYKNKEPSSLEPYQVSDLESLQDWTTRGVG
GPYPWEESMAFLETWLAQNKGELVAIDIHQGGWIGLDATPMERLSGVLTTVSQRDGRSYGKNKKL
RPKKGFMIPPQQAQDLDRIFGKHNLKWRKDRVNGFLKEDEHGNYTGEPTCIQEAYRTFKEYVKTNP
EYIEKYWPGYAKGKHKHQELPHIWEKGLAPPRYKAFKDGNKQLIQRSPKKKDIKNMLHLIYISIIVV
LIIILISYTRKPKYFRITAPRSVALFHGIHPLNPKNYKTFSEEFETILNNAIEDGDFKGQLTEPCSYALRG
GKYIRPIILMEIVRACQLQHSFGAPIYPAEAALAAEYFHVASLIIDDMPSFDNDVKRRNKDTVWARF
GVAKAQMSALALTMQGFQNICRQIDWIKEHCPRFPDPNQLGALLCTFVSHSLNSAGSGQLVDTPEK
TIPFFKIAFIMGWVLGTGSVEDIGMIERAAHCFGHAFQLADDIKDHDTDTGWNYAKIHGKQKTFDD
VAQSLQECKKILHGKKIFTSIWNEIFQKVINVALGTMNVDFIAGINNLGEKIYTCEPFKTSFQNPFIVA
LIITAVVLVVFFAICNPPVDKKRKTKTAIYVYICIVALLFLHYYVLNHQLNDIYNKSNMDVIVSSIHD
KYKGGDEIIPPISPPSVSNELEEDQPKKIPAGPKPADSKPVSLPDSKPLVPLQEVIMPSQYNN
26. C717R-H359L-F317L
(SEQ ID NO. 127)
MTKLAQWMFEQYVKDLNLKNRGSPSFRKWLTLQPSLLRYSGVMRANAFDILKYGYPMQQSGYTV
ATLEIHFKNIRSSFANIYWNRDSEEPEYVCCCATYQSFIDGEYRYRFVWYQPFIEAYNAIEAALDPLE
TTILNLIAARDLDFVVHIFPYNKGHEDYLASTQLILKIFIATLLMDILRIKDNTLDVHLNSDYIIVMERL
WPHIKDAIEHFFEAHKDLLGYLIAFRNGGNFAGSLRPSCGQKIVPLTIREVLQMNDINLAVWREVFI
MQECSDLVINGIAPCFPIFNTWTYLQGINQIFFENTSLQEKFKKDFIARELSKEIIKGQKTLNDKEFKK
LSLHQIQYMESFLLMSDVAIMITTEYVGYTLQSLPGIISRSSYLSPIVKNILMDEDSFMSLLFDLCYGA
YVLHKKENVIHADLHLNNMTYYHFNPTSFTDRNKPGKYTLKVKNPVIAFITGPKVETETYVFKHID
GFGCIIDFSRAIMGPNHAIKLERQYGLAFVNTFYRNQSEHILKVLRYYFPEMLTNRENEIQGVILSNF
NFFFNSITAIDFYAIARNLRSMLSLDYLHTSEVKRNVEISQTFLDTCQFLEEKAVEFLFKNLHTVLSGK
PVEKTAGDVLLPIVFKKFLYPNIPKNILRSFTVIDVYNYNMKRYSGKAIQTFPPWAQTKEILTHAEGR
TFEDIFPRGELVFKKAYAENNHLDKILQRIREQLANENLMEKIFQNVEIKPFLIDFSNLFIKNAAKKLF
QLEEQLPLVPVNVVMDFKGISRAAVHGLSRVLQDEIPNYMLDIKPGGYKIEDSTDLFMTEQFIRNRI
NFIPIYAKNETLVFALRSLNNSCEVKTIYSRDLIQVAGPKLKYPIFNPTFEIGFLQPGKSLIIEDIYIKKGI
GRKHAAFNLAVKTHFSHLDIEQYPTDKKEYMALSGYKQSSMTSDPRHHRLGLCFPAVPLPHINQAV
RTYLKNACRIIIGRIQSIQKIYENFEEPQPELVLFSMDEEKTKAIMKDETHTIGNLLKTYIYEMIPDISF
VGYQCVPHKQEMVLTIIHKASQEDLITLLEKSIQNIIQTFQILEKNVDELIAMVETQMDKLGFLLNHI
GKQVTTKVLSNAHITQTMKEIILENHSVDGGAAKNVSKGKSSPKEKKHWTEFESWEQLSKSKRSFK
EYWAERNEIVNTLLLNWDNVRGAIKKFLDDDREWCGRINMINGVPEIVEIIPSPYRAGENIYFGSEA
MMPADIYSRVANKPAMFVFHTHPNLGSCCGGMPSICDISTTLRYLLMGWTAGHLIISSNQVGMLTV
DKRIIVDLWANENPRWLMAQKILDIFMMLTSRRSLVNPWTLRDLKKILQDYGIEYIIFPSNDFFIYED
ERLLMFSKKWTNFFTLHELLDDLETTETKASSTT
27. MGF505-10R-B475L-MGF360-14L
(SEQ ID NO. 128)
MFSLQELCRKNIYILPYPLAKHVLQQLGLYWKGHGSLQRIGDDHVLLQQDLIFSINEALRMAGEEG
NNEVVKLLLLWEGNLHYAIIGALEGDRYDLIHKYYDQIGDCHKILPLIQDPQIFEKCHELSNSCNIRC
LLEHAVKFIDMLSILQKHKEQIRLHMALTQILFELACHERKNDIIRWIGYSLHIHHLETIFDVAFAHKN
LSLYVLGYELLMHKVNTEAAYIELPNLLSYHLRTAAAGGLLNFMLETIKHGGYLDKTVLSAAIRYK
HRKIVAHFIHQVPRKTVKKLLLYAVQARAPKKTLNLLLSSLNYSVHTITKQLVHNVVIYSSTLIVKLL
LMRRKNKLNLVDAVLARLVKYSTYTDIVQFMGEFSVSPERVIKMAARESRTFLIEMISKAAWGNHP
QTLIHHLKQLTNTMKPQSGKDHIIYTIHYIYLNSNMLVAEEEKNIFKLAKFYANHNAVNRFKQICED
YYILDARFKTLILECFEIAVQKNYPRIANIVDDYIRFLFYRGNITEEEIREAYSLKDAEVYVDLKWLQ
QGEMVMDQEESHVISIFETLGAYFINIFYNFLYKNALYKKHSIVTEYQYQVKGYILGVKQNKKLYE
KMLDSFYKYFCNITQINSKTLNFSNFVTTIVDSFIPKEYSQSISLEKKESILELLLCDYISNLGTFITTEK
MLPFIIKNRKENYHKVTKEMQDYSLTFLLKKRMELYNKFLRKQAYVEPETELEETYARLSSYNRSL
LHQIEELTSENKSLLADLSTLRKKYEKRQSEYRRLVQLLYQQIQRSSTSKSSYPLTKFIETLPSEHFSN
EEYQKETPADQKEVVEMELLRKQELLTSQELTSKSPNNYPVPHSRTIVSKPLDNYPVPRSRTTTKIDF
DNSLQNQELHTKNGFSEKDIVEFGQDKPEEENILAIDQDKPEEETTLAIKQDISEEDNIFAIDQDKPEFN
QDTPEFKEAVLDIKENILEEENQDEPIVQNPFLENFWKPEQKTFNQSGLFEESSNFSNDWSGGDVTLN
FSMLSLQTLAKKVVACNYLSSDYDYTLQRFGLWWDLGPIHLCNNCKQVFSYKHLQCFSEDDLCLE
AALVKAVKSDNLELIRLFVDWGANPEYGLIRVPAVYLKRLCAELGGLTPVSEPRLLEILKEVARLKS
CAGVLLGYDMFCHNPLLETVTRTTLDTVTYTCSNIPLTGDTAHHLLTKFWFALALRHNFTKAIHYF
YKRHKNHLYWRVACSLYFNNIFDIHELCREKEICISPNLMMKFACLREKNYAAIYYCHRLGASLDY
GMNLSIYNNNTLNMFFCIDLGAADFDRAQLIAFIKAYMYNLSNIFLVKQLFSRDVTLVLDVTEPQEIY
DMLKTYTSKNLKRAEEYLTAHPEIIVID
28. MGF505-2R-B407L-MGF360-13L-E111R
(SEQ ID NO. 129)
MFSLQDLCRKHLFILPDVFGEHVLQRLGLYWRCHGSLQRIGDDHILIRRDLILSTNEALRMAGEEGN
NEVVKLLLLWKGNLHYAVIGALQGDQYDLIHKYENQIGDFHFILPLIQDANTFEKCHALERFCGVS
CLLKHATKYNMLPILQKYQEELSMRAYLHETLFELACLWQRYDVLKWIEQTIHVYDLKIMFNIAIS
KRDLTMYSLGYIFLFDRGNTEATLLTQHLKKTAAKGLLHFVLETLKYGGNIDTVLTQAVKYNIIRK
LLDYFLRQLPRKHIEKLLLLAVQEKASKKTLNLLLSHLNYSVKRIKKLPRYVIEYESTLVIKILLKKR
VNLIDAMLEKMVRYFSATKVRTIMDELSISPERVIKMAIQKMRTDIVIHTSYVWEDDLERLTRLKN
MVYTIKYEHGKKMLIKVMHGIYKNLLYGEREKVMFYLAKLYVAQNAATQFRDICKDCYKLDVAR
FKPRFKQLILDCLEIITKKSCYSILEILEKHIISLFTMKVMTEEEKNLCLEILYKVIHYKTIQCMEDTTFL
EGANLAGITTLMNNLHINEQANLEELEKQVMGKQQSFPTDHFDEELNGLAKSLGINFNDPEFSLDSP
HSIISKKPSGRGGDKVHGGIRRDSVCTDSICSDSVCSGSIRSGSIRSGSIRNGSIRSGSVRDGSIRNGSVR
SGKTRRGLACNSSSRNDRGYSLSTHRKKYAESEASQKTAISKRDRKNHYAESEYSEKSIKPSTKQVD
RLINHLRSNGDPNSFYKKDFIDYERKTKLVKLEKINMLLTYLGNEQISTDDIKIPTIDSSMQEIDDVIE
MLTLRNVGIRYSSIAEEILIGLARGLEIVFDGTREIPFLNYRPDYTGLHNTFMIKLFKMRYETSQVVGN
LVQNMSPLSKICLELGPSLLLYPALIRTKHKASEDLYNLLQKGPEDPFTAYNEIHETLKKNNKMSLPL
SLQTLVKKTIASQCLSIDEHCILKYCGLWWHDAPLKLCMDRGRIQIKSGFLGEDIDLRVALIIAVKEN
NYSLIKLFTEWGANINYGLLSINTKHIRELCRQLGAKETLEDNDIFRIFTRIMHNKTSGSIILCHEIFMN
NPILENKFVIQLRGLIYKRLWGLIEIKETDELNGLLVKYWYAKAVQYDCKDAICFLDEKYTDLNEW
RLKCLLYYNKIYELHEMYHKENIQIDVHDMICLASTKDNNPLTIYYCYALGGNINQAMLTSVQYYN
IGNIFFCIDLGGNAFEEGRAIAEQKGYNFLSHSLALDIYSSDASLPLNLKDPEETSSLLKDYKSKNLSII
WEYSHNILMSFSECPLVISACKKFLQKRITIENEALINALITALAQTSTLNDLCLLPIQTYLLSYKNAFE
WIHFVCIAITTILDNKYNWKDCTVDINYIFLHVTYIYNIKTKEYLDYCS
29. K421R-EP424R-D339L-S183L
(SEQ ID NO. 130)
MYTHVDVVGIAEASAALYVQKDRDRYLDVLTTIENFIYQHKCIITGESAHLLFLKKNIYLYEFYSNN
VAEHSKALATLLYKLDPEYLTRYTVLITKIPNHWYVINVDQREFVRLYAIPAVKQHLPIPILPFYCTS
ALTQQELFCLGPELQLIQIYSKLCNPNFVEEWPTLLDYEKSMRMLFLEQFPQRLEMTGGKKEEKEK
HESIIKKIILEMVSTRQRIVVGGYIQKNLYNHVLKNRNRLQLITSLNIYEEKDIIQQFCDSNGLKIKIRIN
NPLLPTNPELRRLTIYFNHNNDDDQSYLIVDMYNTGSYELVPTNQINTLDGSFLIGTPFVQARFLLVEI
WVLMLIAQQTKKDTKKIIQFFINQYEMLMNSPWPSMEALFPSSSKRYLGNYVDPNALIKWAQLKLK
RIPPFYPGKPDEESCMSNYYYYYGGGRYDWLKTVEPTNFLKIGLPYQAFIPLHLQHQATTPPSILEKF
KRADILLNEVKAEMDPLMLQPETEKKLFQILSSIDMFKGLRKKVEFTYNAQIVTNAWLKMYELLNT
MNFNNTSQAFCNCELPGGFISAINHFNYTMMHYPTFNWVASSLYPSSETDALEDHYGLYQCNPDN
WLMQSPLLKKNIDYNNGDVTIASNVKNLALRATQRLTPIHLYTADGGINVGFIDYNKQEELNLKLH
FGQALTGLLSLSKGGNMILKHYTLNHAFTLSLICVFSHFFEELYITKPTSSRPTNSETYIVGKNRLRLF
TPKEEQVLLKRLEFFNDTPLVDLSLYQNLLESVYFAVETIHLKQQIEFLNFGMKCYRHFYNKIKLLN
DYLAPKKKIFQDRWRVLNKLYVLEKKHKLKLCASMIDQKIFETTLNIDDPTNFCTNVEAHLLKELE
NIYVGKCFKNSFILNITGVIQRSPCFIMRTNNSGRGYMHVRFSAVVSYLNAFDLIAAVKIIKNDSNIIL
GESLLTEPVTIVIPSSESQNNVAEVGQIVPVQLANSSVYYIPGRQQASATGSIFIPKHTFSVYHVQEEL
TQEQALNLTKLVNIIEMLLESRSKKDFKQICFFEKLYYTYSISSDEILDLKIWKGPKGKEMSRLKPCN
VLSFLYDALKNKNSSLGFWARPPNLLKSSPLAYQQDQNSFNATELPIICSAEVMFVTLLKEIINYLQFI
NDLCDTFNNEQLIKRHENIWMLIEQRKIGHDFMSVVVGGVEYSLNNWARYEIKRRAAELESVNYYP
HCEYIMPEDIVVSILGSKPNCPFLEALKRFHDFLKKRRIIFKGEYLVIPWMGAQDVADMIHHVENRIN
LDHLEDLAHMLKLITYHRSFDTCINQAFEHLYAFKFPDANIETHELKHIRQLEKKMYGYILRLEKLQ
TVLTFYIEFLLKQV
30. EP296R-B263R-C257L-I243L-A179L-B117L
(SEQ ID NO. 131)
MFGAFVSHRLWSDSGCTTTCITNSIANYVAFGEQIGFPFKSAQVFIAGPRKAVINIQEDDKVELLKMI
VKHNLWVVAHGTYLDVPWSRKSAFVTHFIQQELLICKEVGIKGLVLHLGAVEPELIMEGLKKIKPV
EGVVIYLETPHNKHHTYKYSTIEQIKELFLRIRNTRLKQIGLCIDTAHIWSSGVNISSYNDAGQWLRSL
ENIHSVIPPSHIMFHLNDAATECGSGIDRHASLFEGMIWKSYSHKIKQSGLYCFVEYVTRHQCPAILE
RNLGSSMQLQTALTAEFTTLKSLLKMEDETELCFRSNKVTRLEMFVCTYGGKITSLACSHMELIKM
LQIAEPVKALNCNFGHQCLPGYESLIKTPKKTKNMLRRPRKTEGDGTCFNSAIEASILFKDKMYKLK
CFPSTGEIQVPGVIFPDFEDGKNIIQQWVDFLQHQPIEKKIQIIEFKTIMINFKFQINPVSPRVIIHLKKFA
ALLEHIPTPYPIREIKPPLEDSKVSAKFMVSPGKKVRINVFLKGKINILGCNTKESAETIYTFLKDLISV
HWQEILCVLPVPDMYSVCDVVRDAVAQSHLCACPNDKLPQCKGVTKAPPKCSVFHVAKLQDTKF
KWKYTLDPLKAQKLSQIDKDIEKDAITLKLIYGIELSPEDLEWWKMQRCLINKKTGAKGGQFANKY
LERQDLELLGYSPTPIIGGDFMFTALPDKVLRTIPVAWDRFLNPAMMIFFLIILLCVILGIFYVLVRNTL
RRKQKSKQHQMEIKRFIKEKEQDPYIHTSFESWPADPNKEWKDLIPVYEAQGYCMADYRKKLGMP
PGPNCMKMHIARDSIVFLLNKYLQNTILTNKIEQECFLQADTPKKYLQYIKPFLINCMTKNITTDLVM
KDSKRLEPYIILEMRDIIQMMFFRTLQKHMFFKEHTDLCTEYAQKIEASCYHYTYQQQEKTFLEEYS
TRCGTINHIINCEKKSHQQQDNDALNKLISGELKPEAIGSMTFAELCPSAALKEKTEITLRSQQKVAE
KTSQLYKCPNCKQRMCTYREVQIRALDEPSTIFCTCKKCGHEFIGMEGEELIYHNIINEILVGYIKYYI
NDISEHELSPYQQQIKKILTYYDECLNKQVTITFSLTSVQEIKTQFTGVVTELFKDLINWGRICGFIVFS
AKMAKYCKDANNHLESTVITTAYNFMKHNLLPWMISHGGQEEFLAFSLHSDMYSVIFNIKYFLSKF
CNHMFFRSCVQLLRNCNLIMGYTIQLDKDGDYCWDEDPTHHDPYMQANATSHVATSYATTSHAA
TPHAAAHHTFHEPFIKLNLTDKNIFNGLGFILIVIFIYLLLITLQQMLTRHIYNTVQHCVKAHLDSKNL
Q

[0145] Such multicistronic cassettes can be administered to animals as described above.

The application's sequence listing, which the Patent Office published only in electronic form, follows.

SEQUENCE LISTING (157 sequences)

SEQ ID NO: 1 - protein, 2546 aa, African swine fever virus
MGNRGSSTSSRPLPSSEANIYAKLQDHIQRQTRPFSGGGYFNGGGDKNPVQHIKDYHIDSVSSKAKLRIIEGIIRAIAKIGFKVDTKQPIEDILKDIKKQLPDPRAGSTFVKNAEKQETVCKMIADAINQEFIDLGQDKLIDTTEGAASICRQIVLYINSLTHGLRAEYLDVHGSIENTLENIKLLNDAIKQLHERMVTEVTKAAPNEEVINAVTMIEAVYRRLLNEQNLQINILTNFIDNILTPTQKELDKLQTDEVDIIKLLNDTNSVLGTKNFGKVLSYTLCNLGIAASVANKINKALQKVGLKVEQYLQSKNWAEFDKELDLKRFSGLVSAENIAEFEKAVNLLRQTFNERHKILENSCAKKGGDEEKTPLDRRIEAQRLDRKHILMEFLNKSTQAYNDFLENVKKIGIKLVKEIALTPNITRLRDALSRINDMGTIALDLSLIGFYTNAAAREERETFLTQLTLVKNVLEEISKTDPNFKNLYDSCSRLLQIIDFYTDIVQKKYGGEEDCECTRVGGAALTVEELGLSKAARSQVDLNQAINTFMYYYYVAQIYSNLTHNKQEFQSYEENYATILGDAIAGRLMQLDTEKNARINSPAVDLARGHVGPNPGGAQEVDWKATVSAIELEYDVKRRFYRALEGLDLYLKNITKTFVNNIDSIQTVQQMLDGVRIIGRWFTETTGDTLAQVFESFPTSTGNDSNVFTDNAPAGHYYEKVAAEIQQGRSVGTLRPVRASQAKNIRDLIGRSLSNFQALKNIINAFARIGDMLGGEELRQMVPMSPLQIYKTLLEYLQHSALSVGLKNLNQSEIGGQRMALAQTAEEAAQRVYLSTVRVNDALSTRWETEDVFFTFMLKSMAAKIFIVLGIYDMFERPEPVYKLIPTRMILGGADELEPEVIPEAAELYFRLPRLAEFYQKLFSFRDENVQISMLPELEGIFSGLIRIIFMRPIELINIGDYSETEIRQLIKEINVIYQHFNLEYGEQEATKKALIHFVNEINRRFGVITRTEWEKFQRIVQEARTMNDFGMMNQTNYSILPDEDGYTQSSQLLPSDRFISPSTQPTPKWRPALYNIDSVDVQTGMLQPNSQWDLVQKFRKQLSEMFEDPSLQQELGKISYQELIRQAINELKKEHTDKIQIVSKLIQGSESLADTDVNKIFLFHETVITGLNLLSAIYVLLNNFRNNIKGLDLDTIQKSIIEWLRETQAANVNRANLIDWLGRKHGAISEIRNPGLVIKEINMRLSMVYPDPTTEAAAAGLDLDTIQKSIIEWLRETQAANVNRANLIDWLGRKHGAISEIRNPGLVIKEINMRLSMVYPDPTTEAAAAAQDRNLTTETLFAWIVPYVGIPAGGGVRPEQELAARYLVDNQRIMQLLLTNIFEMTSSFNKMVQVRFPETSTAQVHLDFTGLISLIDSLMADTKYFLDLLRPHIDKNIIQYYENRSNPGSFYWLEEHLIDKLIKPPTDAGGRPLPGGELGLEGVNQIINKTYTLLTKPYNVLQLRGGAQRRDAANIQINNNPQSSERFEQYGRVFSRLVFYDALENNSGLRVEQVALGDFRLSNLIRTNNAQEENTLSYWDNIALRTYANVNDAANNLRRYRLYGSDYGIQNNRSMMMVFNQLIASYITRFYDAPSGKIYLNLINAFANGNFSQAVMEMGYAHPDLARNNNVFGHRGDPTEQSVLLLSLGLILQRLIKDTNRQGLSQHLISTLTEIPIYLKENYRANLPLFNKMFNILISQGELLKQFIQYTNVQLARPNLTALLGANNDSVIYYNNNNVPATGLSVGQAALRGIGGVFRPNVTLMPLGDAQNNTSDVVRKRLVAVIDGIIRGSHTLADSAMEVLHELTDHPIYLETEEHFIQNYMSRYNKEPLMPFSLSLYYLHDLRIENNEVYDPLLYPNLESGSPEFKLLYGTRKLLGNDPVQLSDMPGVQLIMKNYNETVVAREQITPTRFEHFYTHAIQALRFIINIRSFKTVMMYNENTFGGVNLISENRDDKPIITAGIGMNAVYSLRKTLQDVISFVESSYQEEQINHIHKIVSPKGQTRTLGSNRERERIFNLFDMNIIPINVNALMRSIPLANIYNYDYSFEEIACLMYGISAEKVRSLDTTAPQPDVAEVLNIPNRPPINTREFMLKLLINPYVSVSITQYGNELLSKGNAGYMSRIFRGDNALNMGRPKFLSDQIFNKVLFGSLYPTQFDYDEAGPSLAAGIQRGRERWGHPMSIYINQALHEIVRTIRLAETVRGLRNVIDRNQIIGELNAFRTQLEDTRREVNNLIQTPEIQNNPTPEIIAAIQNWVQQYRGQITNLIDLIGNAGQANSMINLIQNITPQTAGAQLTALFNIRGLPAPPPRQALQNDIEAMQWFMTMVINHPPVLIAPFMLLVNNLKEFLNTLERYVYKTPRWLGPGTARIAQPPVGMAPGINMRHHTSYTENSVLTYITEQNREEGPWSIVKQVGVGIQKPTLVQIGKDRFDTRLIRNLIFITNIQRLLRLRLNLELSQFRNVLVSPDHIINPSITEYGFSITGPSETFSDKQYDSDIRIL

SEQ ID NO: 2 - protein, 646 aa, African swine fever virus
MASGGAFCLIANDGKADKIILAQDLLNSRISNIKNVNKSYGKPDPEPTLSQIEETHLVHFNAHFKPYVPVGFEYNKVRPHTGTPTLGNKLTFGIPQYGDFFHDMVGHHILGACHSSWQDAPIQGTSQMGAHGQLQTFPRNGYDWDNQTPLEGAVYTLVDPFGRPIVPGTKNAYRNLVYYCEYPGERLYENVRFDVNGNSLDEYSSDVTTLVRKFCIPGDKMTGYKHLVGQEVSVEGTSGPLLCNIHDLHKPHQSKPILTDENDTQRTCSHTNPKFLSQHFPENSHNIQTAGKQDITPITDATYLDIRRNVHYSCNGPQTPKYYQPPLALWIKLRFWFNENVNLAIPSVSIPFGERFITIKLASQKDLVNEFPGLFVRQSRFIAGRPSRRNIRFKPWFIPGVINEISLTNNELYINNLFVTPEIHNLFVKRVRFSLIRVHKTQVTHTNNNHHDEKLMSALKWPIEYMFIGLKPTWNISDQNPHQHRDWHKFGHVVNAIMQPTHHAEISFQDRDTALPDACSSISDISPVTYPITLPIIKNISVTAHGINLIDKFPSKFCSSYIPFHYGGNAIKTPDDPGAMMITFALKPREEYQPSGHINVSRAREFYISWDTDYVGSITTADLVVSASAINFLLLQNGSAVLRYST

SEQ ID NO: 3 - protein, 122 aa, African swine fever virus
MADFNSPIQYLKEDSRDRTSIGSLEYDENADTMIPSFAAGLEEFEPIPDYDPTTSTSLYSQLTHNMEKIAEEEDSNFLHDTREFTSLVPDEADNKPEDDEESGAKPKKKKHLFPKLSSHKSK

SEQ ID NO: 4 - protein, 530 aa, African swine fever virus
MAEFNIDELLKNVLEDPSTEISEETLKQLYQRTNPYKQFKNDSRVAFCSFTNLREQYIRRLIMTSFIGYVFKALQEWMPSYSKPTHTTKTLLSELITLVDTLKQETNDVPSESVVNTILSIADSCKTQTQKSKEAKTTIDSFLREHFVFDPNLHAQSAYTCADTNVDTCASMCADTNVDTCASMCADTNVDTCASTCTSTEYTDLADPERIPLHIMQKTLNVPNELQADIDAITQTPQGYRAAAHILQNIELHQSIKHMLENPRAFKPILFNTKITRYLSQHIPPQDTFYKWNYYIEDNYEELRAATESIYPEKPDLEFAFIIYDVVDSSNQQKVDEFYYKYKDQIFSEVSSIQLGNWTLLGSFKANRERYNYFNQNNEIIKRILDRHEEDLKIGKEILRNTIYHKKAKNIQETGPDAPGLSIYNSTFHTDSGIKGLLSFKELKNLEKASGNIKKAREYDFIDDCEEKIKQLLSKENLTPDEESELIKTKKQLDNALEMLNVPDDTIRVDMWVNNNNKLEKEILYTKAEL

SEQ ID NO: 5 - protein, 530 aa, African swine fever virus
MPSNMKQFCKISVWLQQHDPDLLEIINNLCMLGNLSAAKYKHGVTFIYPKQAKIRDEIKKHAYSNDPSQAIKTLESLILPFYIPTPAEFTGEIGSYTGVKLEVEKTEANKVILKNGEAVLVPAADFKPFPDRRLAVWIMESGSMPLEGPPYKRKKEGGGNDPPVPKHISPYTPRTRIAIEVEKAFDDCMRQNWCSVNNPYLAKSVSLLSFLSLNHPTEFIKVLPLIDFDPLVTFYLLLEPYKTHGDDFLIPETILFGPTGWNGTDLYQSAMLEFKKFFTQITRQTFMDIADSATKEVDVPICYSDPETVHSYANHVRTEILHHNAVNKVTTPNLVVQAYNELEQTNTIRHYGPIFPESTINALRFWKKLWQDEQRFVIHGLHRTLMDQPTYETSEFAEIVRNLRFSRPGNNYINELNITSPAMYGDKHTTGDIAPNDRFAMLVAFINSTDFLYTAIPEEKVGGNETQTSSLTDLVPTRLHSFLNHNLSKLKILNRAQQTVRNILSNDCLNQLKHYVKHTGKNEILKLLQE

SEQ ID NO: 6 - protein, 201 aa, African swine fever virus
MDFILNISMKMEVIFKTDLRSSSQVVFHAGSLYNWFSVEIINSGRIVTTAIKTLLSTVKYDIVKSARIYAGQGYTEHQAQEEWNMILHVLFEEETESSASSENIHEKNDNETNECTSSFETLFEQEPSSEVPKDSKLYMLAQKTVQHIEQYGKAPDFNKVIRAHNFIQTIYGTPLKEEEKEVVRLMVIKLLKKISFYLTYI

SEQ ID NO: 7 - protein, 184 aa, African swine fever virus
MDSEFFQPVYPRHYGECLSPVTTPSFFSTHMYTILIAIVVLVIIIIVLIYLFSSRKKKAAAIEEEDIQFINPYQDQQWVEVTPQPGTSKPAGATTASVGKPVTGRPATNRPATNKPVTDNPVTDRLVMATGGPAAAPAAASAPAHPAEPYTTVTTQNTASQTMSAIENLRQRNTYTHKDLENSL

SEQ ID NO: 8 - protein, 158 aa, African swine fever virus
MFSNKKYIGLINKKEGLKKKIDDYSILIIGILIGTNILSLIINIIGEINKPICYQNDDKIFYCPKDWVGYNNVCYYFGNEEKNYNNASNYCKQLNSTLTNNNTILVNLTKTLNLTKTYNHESNYWVNYSLIKNESVLLRDSGYYKKQKHVSLLYICSK

SEQ ID NO: 9 - protein, 78 aa, African swine fever virus
MPTKAGTKSTANKKTTKGSSKSGSSRGHTGKTHASSSMHSGMLYKDMVNIARSRGIPIYQNGSRLTKSELEKKIKRSK

SEQ ID NO: 10 - protein, 205 aa, African swine fever virus
MVEPREQFFQDLLSAVDQQMDTVKNDIKDIMKEKTSFMVSFENFIERYDTMEKNIQDLQNKYEEMAANLMTVMTDTKIQLGAIIAQLEILMINGTPLPAKKTTIKEAMPLPSSNTNNEQTSPPASGKTSETPKKNPTNAMFFTRSEWASSNTFREKFLTPEIQAILDEQFANKTGIERLHAEGLYMWRTQFSDEQKKMVKEMMKK

SEQ ID NO: 11 - protein, 104 aa, African swine fever virus
MSTKKKPTITKQELYSLVAADTQLNKALIERIFTSQQKIIQNALKHNQEVIIPPGIKFTVVTVKAKPARQGHNPATGEPIQIKAKPEHKAVKIRALKPVHDMLN

SEQ ID NO: 12 - protein, 229 aa, African swine fever virus
MIILIFLIFSNIVLSIDYWVSFNKTIILDSNITNDNNDINGVSWNFFNNSFNTLATCGKAGNFCECSNYSTSIYNITNNCSLTIFPHNDVFDTTYQVVWNQIINYTIKLLTPATPPNITYNCTNFLITCKKNNGTNTNIYLNINDTFVKYTNESILEYNWNNSNINNFTATCIINNTISTSNETTLINCTYLTLSSNYFYTFFKLYYIPLSIIIGITISILLISIITFL

SEQ ID NO: 13 - protein, 158 aa, African swine fever virus
MNKKIIVMMALLHKEKLIECIYHELENGGTILLLTKNIVVSEISYIGNTYKYFTFNDNHDLISKEDLKGATSKNIAKMIYNWIIKNPQNNKIWSGEPRTQIYFENDLYHTNYNHKCIKDFWNVSTSVGPHIFNDRSIWCTKCTSFYPFTNIMSPNIFQ

SEQ ID NO: 14 - protein, 119 aa, African swine fever virus
MLHWGPKYWRSLHLYAIFFSDAPSWKEKYEAIQWILNFIESLPCTRCQHHAFSYLTKNPLTLNNSEDFQYWTFAFHNNVNNRLNKKIISWSEYKNIYEQSILKTIEYGKTDFIGAWSSL

SEQ ID NO: 15 - protein, 196 aa, African swine fever virus
MNIIRKLKPGTISLVLGPMFAGKTTFLIHCIYMLERLEKKVVFIKSTKNTRDKTIKTHSGIQLRPKQCKIIESTQLSDVGSLTDIHAVVVDEAHFFDDLITCRTWAEEEKIIILAGLNASFEQKMFPPIVRIFPYCSWVKYIGRTCMKCNQHNACFNVRKNADKTLILAGGSELYVTCCNNCLKNTFIKQLQPIKY

SEQ ID NO: 16 - protein, 80 aa, African swine fever virus
MLIPVVCFTCGFPIGTYAAIFDKARTEYIKTKMGGTLPQNIPLDASLQIELKDLITALGIPMRVCCRTHLITTLDYRKYY

SEQ ID NO: 17 - protein, 438 aa, African swine fever virus
MYHDYASKLLADYRSDPPLWESDLPRHNRYSDNILNSRYCGNKNGAAPVYNEYTNSPEKAEKGLQLSDLRNFSFMLNPQHKNIGYGDAQDLEPYSSIPKNKLFNHFKNHRPAFSTHTENLIRRNVVRTEKKTFPQVASLKGTQKNCLTQPSSLPSLKNPKNSSVPSTRFSEHTKFFSYEDLPKLRTKGTIKHEQHLGDQMPGQHYNGYIPHKDVYNILCLAHNLPASVEKGIAGRGIPLGNPHVKPNIEQELIKSTSTYTDVPMLGPLPPKDSQHGREYQEFSANRHMLQVSNILHSVFANHSIKPQILEDIPVLNAQLTSIKPVSPFLNKAYQTHYMENIVTLVPRFKSIANYSSPIPNYSKRNSGQAEYFDTSKQTISRHNNYIPKYTGGIGDSKLDSTFPKDFNASSVPLTSAEKDHSLRGDNSACCISSISPSL

SEQ ID NO: 18 - protein, 298 aa, African swine fever virus
MSRPEQQLKKMLKNPQAQYAFYPTAKVERISTTQHMYFIATRPMFEGGRNNVFLGHQVGQPIIFKYVSKKEIPGNEVIVLKALQDTPGVIKLIEYTENAMYHILIIEYIPNSVDLLHYHYFKKLEETEAKKIIFQLILIIQNIYEKGFIHGDIKDENLIIDINQKIIKVIDFGSAVRLDETRPQYNMFGTWEYVCPEFYYYGYYYQLPLTVWTIGMVAVNLFRFRAENFYLNDILKRENYIPENISETGKQFITECLTINENKRLSFKSLVSHPWFKGLKKEIQPISELGVDYKNVIT

SEQ ID NO: 19 - protein, 419 aa, African swine fever virus
MLNQFPGQYSNNIFCFPPIESETKSGKKASWIICVQVVQHNTIIPITDEMFSTDVKDAVAEIFTKFFVEEGAVRISKMTRVTEGKNLGKKNATTVVHQAFKDALSKYNRHARQKRGAHTNRGIIPPMLVKYFNIIPKTFFEEETDPIVQRKRNGVRAVACQQGDGSILLYSRTKKEFLGLDNIKKELKQLYLFIDVRVYLDGELYLHRKPLQWIAGQANAKTDSSELHFYVFDCFWSDQLQMPSNKRQQLLTNIFKQKEDLTFIHQVENFSVKNVDEALRLKAQFIKEGYEGAIVRNANGPYEPGYNNYHSAHLAKLKPLLDAEFILVDYTQGKKGKDLGAILWVCELPNKKRFVVTPKHLTYADRYALFQKLTPALFKKHLYGKELTVEYAELSPKTGIPLQARAVGFREPINVLEII

SEQ ID NO: 20 - protein, 145 aa, African swine fever virus
MDHYLKKLQDIYTKLEGHPFLFSPSKTNEKEFITLLNQALASTQLYRSIQQLFLTMYKLDPIGFINYIKTSKQEYLCLLINPKLVTKFLKITSFKIYINFRLKTFYISPNKYNNFYTAPSEEKTNHLLKEEKTWAKIVEEGGEES

SEQ ID NO: 21 - protein, 385 aa, African swine fever virus
MDEIINKYQAVEKLFKEIQQGLAAYDQYKTLISEMMHYNNHIKQEYFNFLMIISPYLIRAHSGETLRNKVNNEIKRLILVENINTKISKTLVSVNFLLQKKLSTDGVKTKNMWCTNNPMLQVKTAHNLFKQLCDTQSKTQWVQTLKYKECKYCHTDMVFNTTQFGLQCPNCGCIQELMGTIFDETHFYNHDGQKAKSGIFNPNRHYRFWIEHILGRNPEQELGTKQDPCGTKVLQQLKKIIKRDNKCIALLTVENIRKMLKEINRTDLNNCVSLILRKLTGVGPPQISESILLRGEYIFTEAIKIREKVCKKGRINRNYYPYYIYKIFDAILPPNDTTNRRILQYIHLQGNDTLANNDSEWESICMELPEIKWKPTDRTHCVHFF

SEQ ID NO: 22 - protein, 334 aa, African swine fever virus
MLIFISNMEELLIENSQRFTIFPIQHPECWNWYKKLESLTWTAQEVDMCKDIDDWEAMPKPQREFYKQILAFFVVADEIVIENLLTNFMREIKVKEVLYFYTMQAAQECVHSEAYSIQVKTLIPDEKEQQRIFSGIEKHPIIKKMAQWVRQWMDPDRNTLGERLVGFAAVEGILFQNHFVAIQFLKEQNIMPGLVSYNEFISRDEGMHCSFACFLISNYVYNIPEEKIIHKILKEAVELVDEFINYAFDKARGRVPGFSKEMLFQYIRYFTDNLCFMMQCKSIYKVGNPFPQMTKFFLNEVEKTNFFELRPTQYQNCVKDDAFAFKLFLNDDDF

SEQ ID NO: 23 - protein, 307 aa, African swine fever virus
MTTHIFHADDLLQALQQAKAEKNFSSVFSLDWDKLRTAKRNTTVKYVTVNVIVKGKKAPLMFNFQNEKHVGTIPPSTDEEVIRMNAENPKFLVKKRDRDPCLQFNKYKISPPLEDDGLTVKKNEQGEEIYPGDEEKSKLFQIIELLEEAFEDAVQKGPEAMKTKHVIKLIQRKISNSAVKNADKPLPNPIARIRIKINPATSILTPILLDKNKPITLQNGKTSFEELKDEDGVKANPDNIHKLIESHSIHDGIINARSICISNMGISFPLCLEMGVVKVFEKNNGIDVNSIYGSDDISTLVNQIAIA

SEQ ID NO: 24 - protein, 108 aa, African swine fever virus
MVNLFPVFTLIVIITILITTRELSTTMLIVSLVTDYIIINTQYTEQQHENNTFFMPQKNSFNESYNKDKKSNIHIPYQWLAPELKEAESKYWWGNYDPHSEPVLAGAS

SEQ ID NO: 25 - protein, 165 aa, African swine fever virus
MVNPNKRIMNKKSKQASISSILNFFFFYIMEYFVAVDNETSLGVFTSIEQCEETMKQYPGLHYVVFKYMCPADAENTDVVYLIPSLTLHTPMFVDHCPNRTKQARHVLKKINLVFEEESIENWKVSVNTVFPHVHNRLSAPKLSIDEANEAVEKFLIQAGRLMSL

SEQ ID NO: 26 - protein, 778 aa, African swine fever virus
METFFIETLASDVYGKALNVDLDRLSQAQVKYTLQELISYCSALTILHYDYSTLAARLSVYQLHQSTASSFSKAVRLQAAQSCSRLSPQFVDVVYKYKAIFDSYIDYSRDYKLSLLGIETMKNSYLLKNKDGVIMERPQDAYMRVAIMIYGMGRVVNMKMILLTYDLLSQHVITHASPTMFNAGTKKPQLSSCFLLNVNDNLENLYDMVKTAGIISGGGGGIGLCLSGIRAKNSFISGSGLKSNGIQNYIVLQNASQCYANQGGLRPGAYAVYLELWHQDIFTFLQMPRLKGQMAEQRLNAPNLKYGLWVPDLFMEILEDQIHNRGDGKWYLFSPDQAPNLHKVFDLERSQHENAHREFKKLYYQYVAEKRYTGVTTAKEIIKEWFKTVVQVGNPYIGFKDAINRKSNLSHVGTITNSNLCIEVTIPCWEGDKAEQGVCNLAAVNLAAFIRENGYDYRGLIEASGNVTENLDNIIDNGYYPTEATRRSNMRHRPIGIGVFGLADVFASLKMKFGSPEAIAMDEAIHAALYYGAMRRSIELAKEKGSHPSFPGSAASKGLLQPDLWVRCGDLVSSWEERVAQTTQGVLTPKRWSQLRLAAMQGLRNGYVTALMPTATSSNSTGKNECFEPFTSNLYTRRTLSGEFIVLNKYLIDDLKEINLWTEAIQQQLLNAGGSIQHILDIPAEIRDRYKTSREMNQKILTKHAAARNPFVSQSMSLNYYFYEPELSQVLTVLVLGWKKGLTTGSYYCHFSPGAGTQKKIIRNSEKACNADCEACLL

SEQ ID NO: 27 - protein, 273 aa, African swine fever virus
MSILEKITSSPSECAEHLTNKDSCLSKKIQKELTSFLEKKETLGCDSESCVITHPAVKAYAQQKGLDLSKELETRFKAPGPRNNTGLLTNFNIDETLQRWAIKYTKFFNCPFSMMDFERVHYKFNQVDMVKVYKGEELQYVEGKVVKRPCNTFGCVLNTDFSTGTGKHWVAIFVDMRGDCWSIEYFNSTGNSPPGPVIRWMERVKQQLLKIHHTVKTLAVTNIRHQRSQTECGPYSLFYIRARLDNVSYAHFISARITDEDMYKFRTHLFRIA

SEQ ID NO: 28 - protein, 141 aa, African swine fever virus
MGNKESKYLEMCSEEAWLNIPNIFKCIFIRKLFYNKWLKYQEKKLKKSLKLLSFYHPKKDFVGIRDMLQMAPGGSYFITDNMTEEFLMLVVKHPEDGSAEFTKLCLKGSCIVIDGYYYDNLHIFISETPDIYKYPLIRYDR

SEQ ID NO: 29 - protein, 66 aa, African swine fever virus
MDIKRALILFLLFLVVLSNAFVDYIISNFNHAVTCRKPTYFGIVLQGIFLVILFSIVDYLINENIL

SEQ ID NO: 30 - protein, 868 aa, African swine fever virus
MASLDNLVARYQRCFNDQSLKNSTIELEIRFQQINFLLFKTVYEALVAQEIPSTISHSIRCIKKVHHENHCREKILPSENLYFKKQPLMFFKFSEPASLGCKVSLAIEQPIRKFILDSSILVRLKNRTTFRVSELWKIELTIVKQLMGSEVSAKLAAFKTLLFDTPEQQTTKNMMTLINPDDEYLYEIEIEYTGKPESLTAADVIKIKNTVLTLISPNHLMLTAYHQAIEFIASHILSSEILLARIKSGKWGLKRLLPQVKSMTKADYMKFYPPVGYYVTDKADGIRGIAVIQDTQIYVVADQLYSLGTTGIEPLKPTILDGEFMPEKKEFYGFDVIMYEGNLLTQQGFETRIESLSKGIKVLQAFNIKAEMKPFISLTSADPNVLLKNFESIFKKKTRPYSIDGIILVEPGNSYLNTNTFKWKPTWDNTLDFLVRKCPESLNVPEYAPKKGFSLHLLFVGISGELFKKLALNWCPGYTKLFPVTQRNQNYFPVQFQPSDFPLAFLYYHPDTSSFSNIDGKVLEMRCLKREINHVSWEIVKIREDRQQDLKTGGYFGNDFKTAELTWLNYMDPFSFEELAKGPSGMYFAGAKTGIYRAQTALISFIKQEIIQKISHQSWVIDLGIGKGQDLGRYLDAGIRHLVGIDKDQTALAELVYRKFSHATTRQHKHATNIYVLHQDLAEPAKEISEKVHQIYGFPKEGASSIVSNLFIHYLMKNTQQVENLAVLCHKLLQPGGMVWFTTMLGEQVLELLHENRIELNEVWEARENEVVKFAIKRLFKEDILQETGQEIGVLLPFSNGDFYNEYLVNTAFLIKIFKHHGFSLVQKQSFKDWIPEFQNFSKSLYKILTEADKTWTSLFGFICLRKN

SEQ ID NO: 31 - protein, 339 aa, African swine fever virus
MAGRVKIKQKELIDSTVKNKNVMNLFHEIIGSKGNINFSVVWPKFKKIKQSVYDYISTLSVLEKANVMQNFEADKKLLELFVQKLWAAYEGYFKYPEIEKYEVEGQVNFNLVPQCVLEKFSQLYRIRINSELVTLILNSCAFMSKYNDYILKKDPYILTITPGLCFSPIPNFEDLNFKHLYNSDKNSQHDKEFIMFILYKLYTAALGVYNAISIPDIDVEDLENIILSSVSQIKKQIPRCKDAFNKIESSVHLLRKNFNTYYSDYVGSGYNPTIIMEQYIKDISQDSKNISPRISYQFRTIIKYYRDMIATRHQTMDPQVLNLVKHVEKKLDMLDREKN

SEQ ID NO: 32 - protein, 329 aa, African swine fever virus
MLRVFIFFVFLGSGLTGRIKPQVTCKYFISENNTWYKYNVTILNSSIVLPAYNTIPSNAAGISCTCHDIDYLQKNNISIHYNTSILKTFQDIRIIRCGMKNISEIAGGFGKELKFLDLRYNDLQVIDYNILRKLIRSNTPTYLYYNNLMCGKRNCPLYYFLLKQEQTYLKRLPQFFLRRINFSNNNTFLYHFLSCGNKPGHEFLEYQTKYCRTKFPEINITVNQLIAKKNTERYKSCYPLVFISILCSCISFLFLFICLLRSICKKYSCTKQDKSSHNYIPLIPSYTFSLKKHRHPETAVVEDHTTSANSPIVYIPTTEEKKVSCSRRK

SEQ ID NO: 33 - protein, 224 aa, African swine fever virus
MFPKINTIDPYISLRLFEVKPKYVGYSSIDARNQSFAIHDIKNYEKFSNAGLFYTSPTEITCYCCGMKFCNWLYEKHPLQVHAFWSRNCGFMRATLGIIGLKKMIDSYNDYYNNEVFVKHQNRVYTHKRLEDMGFSKPFMRFILANAFIPPYRKYIHKIILNERYFTFKFAAHLLSFHKVNLDNQTTYCMTCGIEPIKKDENFCNACKTLNYKHYKTLNFSVKL

SEQ ID NO: 34 - protein, 525 aa, African swine fever virus
MFSLQDLCRKNIFFLPNDFSKHTLQWLGLYWKEHGSVHRAEKDSIMIQNELVLSINDALQLAGEEGDTDVVQLLLLWEGNLHYAIIGALKTEKYNLICEYHSQIQDWHILLPMIQDPETFEKCHDLSLGCDFICLLQHAVKYNMLSILVKYKEDLLNARIRHRIQSLFVLACENRRIEIIDWIGQNLPIPEPDAIFSIAVATRDLELFSLGYKIIFDYMQRQGIIQLTNGVRMVVLNRHISMAIDNGLLPFVLETLKHGGNIHRALSYAVTHNRRKILDYLIRQKNIAPNTIERLLYLAVKNQSSRKTLNLLLSYINYKVKNVKKLVEHVVNEKSTLVLKILLEKKENLVDAVLTRLVKHSTYFQVREFIQEFSISPEKFIKIAVREKKNVLIEAISEDIWENPTERITYLKQIVHTIKYESGRRFLVDIIHSIYQSYSLKHEDILKLATFYVKHNAITHFKDLCKYLWLNRGTESKKLFLECLEIADEKEFPDIKSIVSEYINYLFTAGAITKEEIMQAYDALE

SEQ ID NO: 35 - protein, 175 aa, African swine fever virus
METNCPNILYLSGITIEECLQSKKTATDTLNTNDDEAEVEKKLPSVFTTVSKWVTHSSFKCWTCHLYFKTVPKFVPTYMRENERGEIEMGVLGNFCSFSCAASYVDVHYTEPKRWEARELLNMLYRFFTSQWISYIKPAPSYTMRKEYGGKLSEEAFISELHTLEESISSKHIFI

SEQ ID NO: 36 - protein, 475 aa, African swine fever virus
MTSLLKTDFNVSKYRLIAQKREANAVEIEAALEVVREFIIKKKLILYGGIAIDYALHLKGSSIYPEGERPDFDMFSPNHVEDAYELADILYEKGFKQVGTVRAIHVQTMRVRTDFVWVADLSYMPPNIFNTIPTLTYKNLKIIHPDYQRAGLHLAFCFPFDNPPREDVFSRFKKDLQRYNLIEKYYPIPVVPVKSTYESKTFSIPFKQVAIHGFAAYALLYQTLNELRITCKVPEWKTEFPQPSYSYHKNDKNITLTVDMPKAYPALVLATYNPEEVIKEMGLHLTEICEPYMDYSPPIFKTNDIHFFSTMFKELAISIIQDNLIVVSPQYLLLYFLYGAFATPADKSLFLFYYNATLWILEKADSLLNIIQKQTSPEEFTRFANTSPFVLTTRVLSCSQERCTFSPAYRISLANDVQQSQLPLPKTHFLSNSLPDVSTLPYNYYPGKGKDRPTNFSYEKNLLFNIGGKCTPSAM

SEQ ID NO: 37 - protein, 354 aa, African swine fever virus
MALTTHSGKLIPELQFKAHHFIDKTTVLYGPSKTGKTVYVKHIMKILQPHIEQILVVAPSEPSNRSYEGFVHPTLIHYRLWLADKQKKNDNKGAERFLEAIWQRQTMMSSIYSRVNNIDMLKTLYHKLPIDIQQKENKNIAKVECLKAEQTDQKKEEKITSLYQQLLKKIIIQNIHMYKNLCLTEDEKFTLNYINLNPRLLLILDDCAAELHPLFTKEIFKKFFYQNRHCFISMIICCQDDTDLPANLRKNAFVSIFTNASICMSNFSRQSNRYSKQDKEYVEEISHIVFKGYRKLVYIREDEHRQHFYHSTVPLPTAFSFGSKALLKLCKAVYSKEVVIDKSNPYWSKFRLNF

SEQ ID NO: 38 - protein, 345 aa, African swine fever virus
METFVRLFKDSPQQRSDAWHAIRRTQVGGSDLASVLGLNPYKSYYITLAEKANLFKKNLNRAACSWGTLFERVSKDLLELFCQTTVIGDNIHIDGTYLGYPGHSNSPDGFCHLTLGYTQQSWEIKTIFNNVRYEATKRIPVLVEIKSPFNRKIKNSVPSYYMPQIQSGLALSPPISMGIYVEAMFRVCGIHQLGSNNETNTDIHPPESMLPLAWGIITICSTQEHTEAPQDFGTLDAETFRQLLETLYQKDQYTIHYSMPYETACPEMPNVVGYFGWKVFIFQIIPVMKHPQFLKDKYPIIQQFLRDLHTIKASPSPMEMYEKICCSEESALSTEDIDNFTDMLT

SEQ ID NO: 39 - protein, 124 aa, African swine fever virus
MNLEYVQVVQKFNQVLLELTKKVCTVVGGSKPTYWYHHIRRVCSECPSMPMSMIGPYLNVYKAQILTRDKNFFMNFDPAHNEYTFIIQKLKEAARNMPEDELEQYWVKLLFLLKSYIKCKPFIN

SEQ ID NO: 40 - protein, 315 aa, African swine fever virus
MDALLKEIEKLSQPSLQKENNDVCDLCFMQMKKISNYQLLCEECGQLKDWFEPEYNEKFTVYSRLKIVGANSSYHQRDLDKANSSDYSSLQFHHILEELKSLNVKYMDAGQKPFPIQVLKETAHSYNQVQQHRVIRSITKLQILASILRSICLKLNIACTVADAARFTQLNTKGISRGMDLLRSLFVDNKITLNVDLNPIDSFINSTYSALQIKQIHQELQEENVYNLKEIVKSFILYADEKNIGVDLNRRTVVIATMYNVLRRAYYPIEIDTVVYQCKIRKNTITRALKMYEDYYSHFKSLYEQYHLNAAKKLI

SEQ ID NO: 41 - protein, 147 aa, African swine fever virus
MADNDNEDLIMDDLVEEYVETEEENLVDSEEESEDKDEIVESPSICEGFVQASSQTLVIIPDNERITSNVLTTFEATRLVAVRAQQLAINGSTMLKKKYSSPIDIAKQELFNRKIPLLVMRCIKVTPEGQKIVEIWNPREMGIPLLD

SEQ ID NO: 42 - protein, 527 aa, African swine fever virus
MFSLQDLCRKNTFFLPSDFSKHTLHLLGLYWKGHGSIQRIKNDGVLIEHDLTLSINEALILAGEEGNNEVVKLLLLWEGNLHYAIIGALRTENYNLVCEYHSQIQDWHVLLPLIQDPETFEKCHDLSLECDLSCLLQHAVKYNMLSILVKYKEDLLNVLFRQQIQGLFILACENRKLEILTWMGQNLPIPDPEPIFSIAVVTKDLEMFSLGYKIVFEYMENQGLHLTQVVRMVMLNHHFGMVINKGLLPFVLEILNYGGNVNRALSYAVTQNKRKILDHVVRQKNIPHKTIERMLHLAVKKHAPRKTLNLLLSYINYKVKNVKKLLEHVVKYNSTLVIRLLLEKKKNLLDATLTRYVKDSTYFQVKEFMQDFSISPEKFIKIAVREKRNVLIKGISEDIWENPAERIRNLKQIVCTIKYESGRQFLINIIHTIYQSYSLKPEEILKLATFYVKHNATTHFKDLCKYLWLNRRTESKKLFLECLEIADKKEFPDIKSIVSEYINYLFTAGAITKEEIMQAYALEYAMY

SEQ ID NO: 43 - protein, 268 aa, African swine fever virus
MVSLTTCCLKNIVNQHAYVENTVLLYHLGLRWNCKTLYQCTQCNGVNYTNSHSDQCKNKDLFLIKVIVKKNLAVARTLLSWGASPEYARLFCRNTEEEQALNVQHVADVPSSKILERLTMSYKGNDEQLLITFYLLNLSTNFSTNLREQVRFKIVSYIICDLAIHQTFKIFYAKNYSLSTLYCIFLAIYYKLYTALRKMVKIYPGLKSFAYLTGFMFDDETVMETYNSTDDEISECKNRIITIKGYYGNIHCRSDIDHMYAFSQNNFW

SEQ ID NO: 44 - protein, 375 aa, African swine fever virus
MNSLQVLTKKVLIENKAFSNYHEDDIFILQQLGLWWENGPIGFCKQCKMVTSGSMSCSDVDSYELDRALVRAVKKNQTDLIKLFVLWGANINYGIICAKTERTKVLCIQLGADPKFLDVGLYNMFVDLIKQQKVLLAIDIYYDNISILDSFDSHDFYVLIDFIYNRFILNLDEKEKMIKNTYVLKFWFKIAIEFNLIKPIRFLSKKFPHLDYWRLKTAVYLGNVDEIHHAYFQENIRLDPNDMMSLACMYPQNKLGIYYCFALGANINTALETLIGFINHEVNREITFFSNYGIWSNVHFCISLGANPYTKKIQETLLRQEKNVMMKLLFKKGLLSPHSILHKKILEPSEVRKIISTYEYTETFHSFSSLRDNLR

SEQ ID NO: 45 - protein, 350 aa, African swine fever virus
MLPSLQSLTKKVLAGQCVPTNQHYLLKCYDLWWHDAPITFDHNLRLIKSAGIKEGLNLNTALVKAVRENNYNLIKLFAEWGADINYGLVSVNTEHTWDLCRELGAKETLNEEEILQIFIDLKFHKTSSNIILCHEVFSNNPILQKVNNIKMRIEIFWELRELIVKTDLLNNEFSLSTLLLKYWYAIAIRYNLKEAIQYFYQKYTHLNTWRLTCALCFNNVFDLHEAYEKDKIHMDIEEMMRIACIKDHNLSTMYYCYVLGANINQAMLSSIQYYNIENMFFCIDLGADVFEEGTTALGEGYELIKNILSLKIYSPATTPLPKSTDPEIIDHALKNYVSKNMMIFLTYDLR

SEQ ID NO: 46 - protein, 330 aa, African swine fever virus
MQSLFNIALKALTLKNHVEFLKRDKEVLTRLGLCCKNYDLIHKCSECGNICPNGQQHGTCININYLLIYAVKRDNYMLAYRLLCWGANEKFAHYFRRPLPNLKPLLPKKELTPKDIKQLAYEHFHSDSELITVFEVFRKSRNINDCLEFFYKKNIEFEIYFARLYVYSKTFYRKSWYWFCIFMAVKHSMEHALKKITKTYIPTFYNKTTLPLVLFLSACFYENVEWMKNFFYKANKKIQQKMLSYGMEWAATHGKVRTFVCCYTLGGTASLKMYQKAYQNERYMIMALCSYLGNIQINNPWDSLNPYMMVQNKEKFLPLKFSEETQYFYI

SEQ ID NO: 47 - protein, 250 aa, African swine fever virus
MDTAMQLKTSIGLITCRMNTQNNQIETILVQKRYSLAFSEFIHCHYSINANQGHLIKMFNNMTINERLLVKTLDFDRMWYHIWIETPVYELYHKKYQKFRKNWLLPDNGKKLISLINQAKGSGTLLWEIPKGKPKEDESDLTCAIREFEEETGITREYYQILPEFKKSMSYFDGKTEYKHIYFLAMLCKSLEEPNMNLSLQYENRIAEISKISWQNMEAVRFISKRQSLNLEPIIGPAFNFIKNYLRYKH

SEQ ID NO: 48 - protein, 387 aa, African swine fever virus
MNSLQVLTKKVLIETKAFSNYHEDDIFILQQLGLWWENGPIGFCKQCKMVTGGSMSCSDVDSYELDRALVKAVKENQTDLIKLFVLWGADINFGIMCAKTKQTKDLCIQLGANPEFLDVGLYNMFVYLVKRKKVLLAIEIYYDNILILDSFNSNDFHLLIDFVYNRFILYLDEKEEEMTRNTLVLKFWYKFAIDFNLTKPIHYLSKKFPHLDLWRLQTAIYLGNIDEVHHAYFQENIRLGLNVMMFLACARPGNKLGIYYCFALGADLDRALERLISFNSINREINRKIRGEKRLCIEGSYLSNVYFCIGLGANPYTKKIQEIIKQKHSNIMILLFSKKKILSPHSVLQNKILDPSDVHKMISTYKNTESFYPFSSLAVKLIQQANI

SEQ ID NO: 49 - protein, 289 aa, African swine fever virus
MNKIFLNITETINMVLIEFLTGFFYLYGKRLFSISKVMDMICLDYYTIIPAPLAMMLAARLKNYDLMKRLHEWEISIDYALLVVDDVPSIDYCLSLGARSPTRAQKRELLRDNTFNPVYKYLMNCSGFPTKREKNIPCDVQCERLQKNIIKELVFNCSVLLEMVLHTEREYAYALHCAAKHNQLPILMYCWQQSTDAESILLKTCCSDKNINCFNYCILYGGAQNLDAAMVEAAKHDARMLINYCVMLGGRSLNEAKETAAMFGHIECAQHCFKLQSYVVDTSNTDDTD

SEQ ID NO: 50 - protein, 226 aa, African swine fever virus
MFPEREIENLFVKWIKKHIRNGNLTLFEEFFKTDPWIVNRCDKNGSSVFMWICIYGRIDFLKFLFEQESYPGEIINPHRRDKDGNSALHYLAEKKNHLILEGVLGYFGKNGTRICLPNFNGMTPVMKAAIRGRSLNMLSLIKFGADPTQKDYHRGFTAWDWAVFTGNMELVKSLNHDYQNLSTCISLFTSWMFSTGGLRKSPKLLLLAVNIMSMKNFLNRIQSSCV

SEQ ID NO: 51 - protein, 241 aa, African swine fever virus
MAANIIATRAVPKMASKKEHQYCLLDSQEKRHGHYPFSFELKPYGQTGANIIGVQGSLTHVIKMTVFPFMIPFPLQKTHIDDFIGGRIYLFFKELDMQAVSDVNGMQYHFEFKVVPVSPNQVELLPVNNKYKFTYAIPVVQYLTPIFYDLSGPLDFPLDTLSVHVDILSNHIQLPIQNHNLTTGDRVFISGYKHLQTIELCKNNKIFIKNIPPLSSEKIKLYILKNRIRIPLYFKSLKTSK

SEQ ID NO: 52 - protein, 125 aa, African swine fever virus
MAVYAKDLDNNKELNQKLINDQLKIIDTLLLAEKKNFLVYELPAPFDFSSGDPLASQRDIYYAIIKSLEERGFTVKICMKGDRALLFITWKKIQSIEINKKEEYLRMHFIQDEEKAFYCKFLESR

SEQ ID NO: 53 - protein, 1460 aa, African swine fever virus
MKFYYVFSKNMEAGYAEIAAVQFNIAGDNDHKRQGVMEVTISNLFEGTLPAEGGIYDARMGTTDHHYKCITCSHQRKQCMGHPGILQMHAPVLQPLFIAEIRRWLRVICLNCGAPIVDLKRYEHLIRPKRLIEAASSQTEGKQCYVCKAVHPKIVKDSEDYFTFWADQQGKIDKLYPQIIREIFSRVTYDTVVKLGRSKNSHPEKLVLKAIQIPPISIRPGIRLGIGSGPQSFHDINNVIQYLVRKNLLIPKDLQIVRGQKIPLNIDRNLQTIQQLYYNFLLDSVSTTATQGGTGKRGIVMGARPAPSIMRRLPRKEGRIRKSLLGSQVWSISRSTICGNSDLHLDEVGYPISFARTLQVAETVQHYNINRLMPYFLNGKRQYPGCSRVYKQITQSVHDIEGLKQDFRLEVGDILYRDVVTGDVAFFNRQPSLERSSIGVHRIVVLENPKISTFQMNVSACAWYNADFDGDQMNLWVPWSVMSRVEAELLCSVRNWFISTKSSGPVNGQVQDSTVGSFLLTRTNTPMGKNVMNKLHAMGLFQTTQTDPPCFANYSPTDLLDGKSVVSMLLRQTPINYQRAPTWYSEVYAPYMHYNKQDISTQIRNGELIEGVLDKKAVGAGSSGGIYHLISRRYGPQQALKMIFATQQLALNYVRNAGFTVSTADMLLTPEAHQEVQEIINELLLESEEINNRLLHGDIMPPIGLTTHDFYEKLQLNALKFPDRILKPIMNSINPETNGLFQMVATGAKGSNPNMIHIMAGIGQIEINTQRIQPQFSFGRTLVYYPRFALEAQAYGFICNSYIAGLTSPEFIFGEMNGRFDLINKALSTSSTGYANRKAIFGLQSCIVDYYRRVSIDTRLVQQLYGEDGLDARQLETVRFETIMLSDQELEDKFKYTGIQSPLFEEEFSRLKKDRDKYRQIFLNVENFNFSQLLTDVRQVPVNVASIVKNILLSSTSGVLPFDEKSILQKYAMVKTFCKNLPYVFINNIQERLQTPIPVYLKRAASLMRMLIRIELATVKTLNITCEQMSAILDLIRLQYTQSLINYGEAVGILAAQSVSEPLTQYMLDSHHRSVAGGTNKSGIVRPQEIFSAKPVEAEQSSEMLLRLKNPEVETNKTYAQEIANSIELITFERLILQWHLLYETYSSTKKNVMYPDFASDVEWMTDFLENHPLLQPPEDIANWCIRLELNKTTMILKSISLESIINSLRAKHPNTYIMHSVENTASGIPIIIRIYLRESAFRRSTNTRMATDEKIAVNVVDKLLNSTIRGIPGIKNANVVKLMRHRVDAQGKLVRLDNIYAIKTNGTNIFGAMLDDNIDPYTIVSSSIGDTMELYGIEAARQKIISEIRTVMGDKGPNHRHLLMYADLMTRTGQVTSLEKAGLNAREPSNVLLRMALSSPVQVLTDAAVDSAVNPIYGIAAPTLMGSVPRIGTMYSDIIMDEKYITENYKSVDSLIDML

SEQ ID NO: 54 - protein, 1340 aa, African swine fever virus
MDFQNDFLTNPLRVTLYNPVENEYTKTFIFLGSVPANVLQACRKDLQRTPKDKEILQNFYGEDWEKKLSQYVVGGDSDDLDEFEKLFVEDRGEETNVMMPEIETMYSEYSIFPEDTFKDIREKIYVATGIPPYRQHIFFFQNNALQVTYRLLLSGSGVALDIRDYKKEFQQVGGVNIDASMESQKDELYVEALDSFQLIKNIHHIFVADLNTLVAPMRRQISIAIEDNYQFDLLYYGLIMKYWPLLSPDAFKLLVQSPLQMEKQYPALSPSLTSLKKRLLLEQKLINFTYARAQQVIAKYEGNRLTRGTLAVTSAMIKISPLVNIQINVRNVFDLFPATPDIPQLVVFFYSKTGPTVVSKHHITSTEPEKFSNKTFRVPTIILIRFINKKAFILTIQNNGHYFIESNWSENERHDFNSVVSTLNNFINPIIHTINDMGPAAFPRGGSLPLPSNEDIQISISSMSVSTFWPYTLSSKGFTELKSRWREYEQAGIISVRGLQQTGVYNFLFKKGIYSYDPHEIERMIIISSGPGRKMDINVALLQNTYAYLFDTNVAARWETIYGGRNIRIYHRVTDIKIEMFNITQEEFNYLWVYLFVFLDNLITGPDKILVNKLSQLHDKQQGKGASQLRALQEQDPDLYDLRKYDTQATVYSVLCQHPRPPVIYSEAEVKSMPPAKRKELVKYWNFTEGVPAYYSCPHPDYPHLSLLEGRHPLNYCLPCCQKTKALLGTKRFYINNTCLTKHTFVEQDLEDLNTQTSRHTLSYGKKIPVNRIAFLPHQIADELFLNTIKEPDIFCIVGVEQTMLGISNAGLFYSLARILDLAPKALAIEIAKAANTPQYYILGNGAGNMFSSGAELANLILQTFVEQKNQLLQWDTTWQDIFLDLVAICYDLHCVFFKDKQGDIGFEVSPSTIQKILSPSKKIAIIFDTDEGIYPMAITQQKRFLKNSEAQYIFTEDDPVMEVIQSMSEFMCKDNWWDIHDVKNIPGYTVGKKLINRHNFCYALLIDSDTDRPIYFPIRLSSYIHDDIPIDFDLRPTQIASFEETWKFITLFNKQYKQYEIVPSAVLQNIKKEFVGFLSEGKTGLYFYYAPTQTLPATLEKLPIATLTIDPRDIDQAILYPLEEPYPQQNKANKAFYINHLYKFLLIEFFDVLYGLQSNSTRKHIENLFQKTDFQKITSVTEFYTKLSDFVDLNDIHTIKHILETTDAEHALKVLQKNIFNFDYTLLSPLQSYTYDELCQHLKKLLTPRIEFYEDIETIDRGLINIYTSCQYSTLNQPQCKKKRLRIPVNHFENYIHILAADILNPLKHSTLLLTGLGVIDDLQFILRPQEIISVKNKF

SEQ ID NO: 55 - protein, 1249 aa, African swine fever virus
MEEVITIAQIVHRGTDILSLNNEEIEALVDEIYSTLKGSNDIKNIRLIDFLFTLKDFVNHVRAEQSKLPDLSMPIEAYIRQLLVDPDVVPIVSEKKKELRVRPSTRKEIFLINGTHLAVPAEAPIEIYGLKLRLKTFSPQCFMRMAEIGSFSPETLGYVASGANLTNFIRVFMKCVDQETWKKNGEGVVVTTKENIIQFTHQYIELYKFLRSGGHSWLINRLAEEMVHRKLDREDQGSHISNIVETEEIEPEENIKRVIFFLKELSTMYSVSPVFTSGYMPLLYDLYRAGYLEVLWNPVEQKFLQHAEQREKEQMILQQVDMKLTEVITQARQYFKIMEEKIGRVQSDAIREILTMEGKVDDPNSILQEVIKACGKQEAELITTEYLNIKKQWELQEKNACAHLKLVKQLRSGLQYAELLKVLESIRVLYKEKNNTTNWNLCKACGFKLLCPHVDMLIQLQAAEASYDTMRTKLMKFSGINKEKENNQGLIYSYFCKICGEELAHFIQEDRTADVGIIGDLNSKLRVFIWQETMKACTFIHFGKLVDVKQFANIAVNVCLPLVYSIENIKKEEDYDPLTQLYAVIYIYAYILNLIYSSQKNKEFLTITIHGMKADSSLNAYVTFLLEKMMQQYSGIINQLSEITDQWIANNFREAFKKIIHQNGLQGLSVQDDTKVLLTEILLDPMYDYAATVARIDGSIPMHKPRTPKEAEYEFKTVIGRTPAELLSQKEFYDKIYTSKYRPDFTQLTRLNDIYFQEESLRVWWGGRDEEKTSTLIYLRAYELFLKYLQNAPNFNSELAEFKTYENAYGEQKALLAQQGFYNIFDPNTGRADQRTRLFEYKRLPISTLYDERGLPHKWTIYVYKAVDSSQKPAEIEVTRKDVIKKIDNHYALADLRCSVCHVLQHEVGQLNIKKVQTALKASLEFNTFYAFYESRCPKGGLHDFQDKKCVKCGLFTYIIYDHLSQPELVHDYYNNYKDQYDKEKMSIRSIQIKKDMTTPSTETQPKPPQEPWTFDYGKIIKTAKILDISPAVIEAIGAMEGRSYADIREGQGAPPPPTSMDDPRLMAVDSAVRIFLYNYNCLRHVSTFNKPPIHVERLVKHLSYEEKEDLEKVLPNVVNEYHTTFKHLRVTDPASALLYSIEFLCISFLTLYEIKEPSWVVNIVREFALTELNTIIQSEKLLSKPGAFNFMIFGEDFVCSGEDSSMDDISAYSSPGLFGEDIIDRLDDPFSIEDVDISLDVLDNLAPQ

SEQ ID NO: 56 - protein, 60 aa, African swine fever virus
MHSNVSFNFIACVLFPTPLIPSMAMSIPRMINKRKKRIQFLTFLTNLFLYNIVQHCISGI

SEQ ID NO: 57 - protein, 72 aa, African swine fever virus
METQKLISMVKEALEKYQYPLTAKNIKVVIQKEHNVVLPTGSINSILYSNSELFEKIDKTNTIYPPLWIRKN

SEQ ID NO: 58 - protein, 1242 aa, African swine fever virus
MEPLRPQITYGPIETVDNEELTEADMLSFISAAVNSTGLIGYNIKSFDDLMDNGIPQIVKQMFNVDITYKDQRDHTEIDKLRESVQIQFNFTDVNIERPQHRNYSQGNKINLLPNKARLCGLSYSGPVNLAAEVILTAHYSNGRQEVKRASIPPFQVSTFPIMRGSNRCHTHHLSKTAKKEIGEDPNEPGGYFIARGGEWVVDLLENIRFNTLHIHYHTMQQGNNEIIRGEFISQPGGAFENSSQIIIRYMTTGAITIEINSTKFSKLRIPWYLIFRMFGMTGDDSIIEQVVFDLESNSLVNTFMIEILEKSIHVLDPIFQPVQHELNREKIIQFLSEKVSKFVSNPSAYKSDENAVQYLNERQLTILDKILLPHMGQTADTRVRKLRFLGLLIHKILLVIMNVFPPTDRDSYRTKRVHGSGVSLAKAFKAIFNTSVIAPIINGFKELLKQTAFEELTQRNIIEAFSAALSKNTASDLNRSMEQSIISGNKTIMVRQRPIVNRVSTQSLERKNLLNTISALRTVNTHNTTNASKQTERADMMRRVHASYPGYICVAQSADTGEKVGMSKQLAITANVCTAGEVLSLKQRLLSDPAIQQLADVSNKDIVRKGLARVFINGEWIGCCTNAFELAQRYRMLRREGKVVHPHTTIYWDSMVDEVEFWLDVGRLTRPLLIVDNNIEKYNQACYKAAEARKKGDKDWEKHKIPFIQNTRFTPQMAKDILAGTLTLEDLVAQGICEFITPEEAENCLVAFSIIELRKHKHDVTRRFTHVDVPQAILGLAALVSPYANCTQPARVTYETNQGRQTGGWYCFSWPYRVDMNRFFQFYNEMPLVKTIAHNYVIPNGLNTIVAYMIYGGYNQEDSVIVSQSFIDRGGFAGTFYREEKVELESDIESFGKPDPLITKNLKPGANYEKLVDGFVPVGTVVKKGDIIIGKVAKIRGEKDELNKYIDRSVMYGFDEPAVVDAVMRPHGPNDEIFGLMRLRYERNLNIGDKMSSRSGNKGIAALALPTSDMPFTEDGLQPDLIVNPHSHPSRMTNGQMIETTVGLANALQGVVTDGTAFLPINVQLLSERLAQEGLRFNGCQKMFNGQTGEYFDAAIFIGPTYHQRLQKFVLDDRYAVASYGPTDALTGQPLDGKRSHGGLRLGEMEHWVLTAQGAMQTIIEKSHDDSDGCISYICRNCGEPAIYNASHPIYKCMNCDVQADIGMVDSRRSSIVFQHEMRAANVNITSVLSPRVFQPA

SEQ ID NO: 59 - protein, 96 aa, African swine fever virus
MGTFSVTASAKSDDAVCKYLEEPIDENYRNILRNEHVKKNLNEALNRHITTYNPVVDWCNNYSTFSSQDFDEYKIYIHSDLMDGRPRPKKTWCVIM

SEQ ID NO: 60 - protein, 62 aa, African swine fever virus
MNWGSISSGTPGLFVESIRNTPSVVKINVIFLKVISNTAVSVFWRDRRIRFESDWLNSYFQK

SEQ ID NO: 61 - protein, 1206 aa, African swine fever virus
MISIMDRSEIVARENPVITQRVTNLLQTNAPLLFMPIDIHEVRYGAYTLFMYGSLENGYKAEVRIENIPVFFDVQIEFNDTNQLFLKSLLTAENIVYERLETLTQRPVMGYREKEKEFAPYIRIFFKSLYERRKAITYLNNMGYNTAADDTTCYYRMVSRELKLPLTSWIQLQHYSYEPRGLVHRFSVTPEDLVSYQNDGPTDHSIVMAYDIETYSPVKGTVPDPNQANDVVFMICMRIFWIHSTEPLASTCITMAPCKKSSEWTTILCSSEKNLLLSFAEQFSRWAPDICTGFNDSRYDWPFIVEKSMQHGILEEIFNKMSLFWHQKLDTILKCYYVKEKRVKISAEKSIISSFLHTPGCLPIDVRNMCMQLYPKAEKTSLKAFLENCGLDSKVDLPYHLMWKYYETRDSEKIADVAYYCIIDAQRCQDLLVRHNVIPDRREVGILSYTSLYDCIYYAGGHKVCNMLIAYAIHDEYGRIACSTIARGKREHGKYPGAFVIDPVKGLEQDKPTTGLDFASLYPSLIMAYNFSPEKFVASRDEANSLMAKGESLHYVSFHFNNRLVEGWFVRHNNVPDKMGLYPKVLIDLLNKRTALKQELKKLGEKKECIHESHPGFKELQFRHAMVDAKQKALKIFMNTFYGEAGNNLSPFFLLPLAGGVTSSGQYNLKLVYNFVINKGYGIKYGDTDSLYITCPDSLYTEVTDAYLNSQKTIKHYEQLCHEKVLLSMKAMSTLCAEVNEYLRQDNGTSYLRMAYEEVLFPVCFTGKKKYYGIAHVNTPNFNTKELFIRGIDIIKQGQTKLTKTIGTRIMEESMKLRRPEDHRPPLIEIVKTVLKDAVVNMKQWNFEDFIQTDAWRPDKDNKAVQIFMSRMHARREQLKKHGAAASQFAEPEPGERFSYVIVEKQVQFDIQGHRTDSSRKGDKMEYVSEAKAKNLPIDILFYINNYVLGLCARFINENEEFQPPDNVSNKDEYAQRRAKSYLQKFVQSIHPKDKSVIKQGNVHRQCYKYIHQEIKKKIGIFADLYKEFFNNTTNPIESFIQSTQFMIQYFDGEQKVNHSMKKMVEQHATASNRAGKPAGNPAGNALMRAIFTQLITEEKKIVQALYNKGDAIHDLLTYIINNINYKIATFQTKQMLTFEFSSTHVELLLKLNKTWLILAGIHVAKKHLQAFLDSYNNESPSRTFIQQAIEEECGSIKPSCYDFIS

SEQ ID NO: 62 - protein, 102 aa, African swine fever virus
MGNHPIKQDMKTCDYYHGEKKLKYMRRMLYNEPLGTYAVSSLFGCDMIVLTWNCTISGRTLHRRIHTRFGQYYHNNCYYTKIDDIIGDYPDTFYRPLYRYKP

SEQ ID NO: 63 - protein, 81 aa, African swine fever virus
MDTSLKNNDGALEADNKNYQDYRAEPDKTNDVLDVTKYNSMVDCCHKNYSTFTSEWYINERKYNDVPEGPKKAVVHRCTIL

SEQ ID NO: 64 - protein, 1192 aa, African swine fever virus
MEAFEISDFKEHAKKKSMWAGALNKVTISGLMGVFTEDEDLMALPIHRDHCPALLKIFDEIIVNATDHERACHNKTKKVTYIKISFDKGVFSCENDGPGIPIAKHEQASLIAKRDVYVPEVASCHFLAGTNINKAKDCIKGGTNGVGLKLAMVHSQWAILTTADGAQKYVQHINQRLDIIEPPTITPSREMFTRIELMPVYQELGYAEPLSETEQADLSAWIYLRACQCAAYVGKGTTIYYNDKPCRTGSVMALAKMYTLLSAPNSTIHTATIKADAKPYSLHPLQVAAVVSPKFKKFEHVSVINGVNCVKGEHVTFLKKTINEMVVKKFQQTIKDKNRKTTLRDSCSNIFIVIVGSIPGIEWTGQRKDELSIAENVFKTHYSIPSSFLTSMTKSIVDILLQSISKKDNHKQVDVDKYTRARNAGGKRAQDCMLLAAEGDSALSLLRTGLTLGKSNPSGPSFDFCGMISLGGVIMNACKKVTNITTDSGETIMVRNEQLTNNKVLQGIVQVLGLDFNCHYKTQEERAKLRYGCIVACVDQDLDGCGKILGLLLAYFHLFWPQLIIHGFVKRLLTPLIRVYEKGKTMPVEFYYEQEFDAWAKKQTSLANHTVKYYKGLAAHDTHEVKSMFKHFDNMVYTFTLDDSAKELFHIYFGGESELRKRELCTGVVPLTETQTQSIHSVRRIPCSLHLQVDTKAYKLDAIERQIPNFLDGMTRARRKILAGGVKCFASNNRERKVFQFGGYVADHMFYHHGDMSLNTSIIKAAQYYPGSSHLYPVFIGIGSFGSRHLGGKDAGSPRYISVQLASEFIKTMFPAEDSWLLPYVFEDGQRAEPEYYVPVLPLAIMEYGANPSEGWKYTTWARQLEDILALVRAYVDKDNPKHELLHYAIKHKITILPLRPSNYNFKGHLKRFGQYYYSYGTYVISEQRNIITITELPLRVPTVAYIESIKKSSNRMTFIEEIIDYSSSETIEILVKLKPNSLNRIVEEFKETEEQDSIENFLRLRNCLHSHLNFVKPKGGIIEFNTYYEILYAWLPYRRELYQKRLMREHAVLKLRIIMETAIVRYINESAELNLSHYEDEKEASRILSEHGFPPLNHTLIISPEFASIEELNQKALQGCYTYILSLQARELLIAAKTRRVEKIKKMQARLDKVEQLLQESPFPGASVWLEEIDAVEKAIIKGRNTQWKFH

SEQ ID NO: 65 - protein, 152 aa, African swine fever virus
MYSILIACLVLLLCLVIYVGHRADHARKYLEGMWHGDPVFLKQSGLQSFYLYIQPDHTCFFSIVNKNGEKLMETKIPCTITNKIYMFFKPIFEFHVVMEDIHSYFPKQFNFLLDSTEGKLILENNHVIYAVLYKDNFATALGKTVEKYITQN

SEQ ID NO: 66 - protein, 50 aa, African swine fever virus
MHISIITRYTLKYIYMHLTHNHILFTYIMRIYLIKHNHMLFTTHVYTYIM

SEQ ID NO: 67 - protein, 1133 aa, African swine fever virus
MAYPELDAADFLQQLARRKEFKSLISPPVDQKELIRDLRAHFVQIGGPGCEKGGRAFFPCDPYASPFPSIKGLQLHNAQLFVQNFQNPNTPYSRLLLNWQTGTGKSIAAIAIARQFMNHYMNFIENAPWIFVVGFTRAIIQTEMLRRPELGFVSYKEVAELHRLLHIAKQSGSTTSVESRHLNGFVSTLKRRLTDRNRGGFFQFYGYKEFASKLFNITSKGEEKNFDVLSLFHRSDEAEDTLNENDISQFVQKISEAETNGLIRVNQKIMEQLRGGLLIADEIHNVYNIQERNNYGIALQYVLDAFPPHQAPRAVFMSATPVTGSVMEYVDLLNLLVPRHELPNGQPLQRQQLFDSSGHSVKWKKDALALVERLSTGRVSFLLDTNTNFYPERIFAGKMLSYKDETLPYLHFIECPMSEYQLETLKQLGPDPKISSNAYSIYDMVFPNPKFSKQTEPKAYGLFNSTETPTALSMASTDWLLENGVQIIEPSRRAPFNVSGSFLSLQPPTHISGLAFYSGKYTQMMKDILSIIRQGRGKILIYHNRVRMSGVLILQEILQSNGILNEVSSPVGTTRCSICAAIRDEHTHSDHQFIPVRFTILHSEIEPAVRERSLALFNASSNLEGHQLRILIGSKVIVEGLNFQAVRYEMIMSLPLDIPRLIQVFGRVVRKNSHMELPPSERNVTIYLYVSTTPDGGPELAKYAQKLKEYILIQEGDKALRKHAIDGFTNQIKIDKPMLESLPLSPSITPANVGATVLNTFEAYGYGEQEVKTISNIIISLFMARPVWTYSELWKAVSTPKLIQGITIDNKLFSEDNFALALISLCYSKNQCKELWIQNRLCTIMHVPAKPEHLYVAAVLNHKKEPVLDIETYIRDFQPPAMHSIRITKYLEHSQTKEPFQVLYEKFQKDFQDEPMEQVLIHYPASFHYTMLEALIIDNLAGMGALVEVYKKFFIAFSKKDIQPFPDIFKIISHVPGDDNTLVGYATEDSVRLITSREDKTWHEIPLYMLNINVKRKENDIVIGYMESKGKALKFKIRPPIQVLKKNEITDIRMLNRGAVCETRGREEQQKIADQLGISLNLTKISAIKLCLLIRNNLLQKEMEARNQPNGMQDGIRWFYLFNDKMPSLVHTS

SEQ ID NO: 68 - protein, 165 aa, African swine fever virus
MATNFFIQPITEEAEAYYPPSVITNKRKDLGVDVYCCSDLVLQPGLNIVRLHIKVACEHMGKKCGFKIMARSSMCTHERLLILANGIGLIDPGYVGELMLKIINLGDTPVQIWAKECLVQLVAQGDHVPDHINILKRNQIFPLFAPTPRGEGRFGSTGEAGIMRT

SEQ ID NO: 69 - protein, 105 aa, African swine fever virus
MKICKACSSCMVRTYVDGNIIFRCSCGESVQGDSQNLLVSSKVYHTGEMEDKYKIFIKNAPFDPTNCQIKKDCPNCHLDYLTQICIGSQKIIILVCRCGYMSNRG

SEQ ID NO: 70 - protein, 1048 aa, African swine fever virus
MQETFKFLRCNSQGEAVEDKYSLETLKNHFVVRDEYNNLFRVFSSRDDFWEWEAAQPFEQKCFHEVVFGFLPQRLKFDIDFPVNKSYSDDNVDDNDNVEDNVYDILDMIINVIMDVFYETYSLPYNINLTREQILLTDSIGLNKKRELKYSFHIILYTYSVLNNNEAKVFTSKVLENLPKHVYPFVDPQVNKSIQNFRIIGSHKKGSMRVKMFNEELAEVFETSTTTKKSDTLIATPFETTCLPCIFTNVKETTPSSCDTIQQSELEEVLKFAGTLCKNHCFLRVHKNLVLFKRTSPSYCEICKRMHDKDNTLILRVTGNKVYQHCRHDNKHSLLMGSLSGTNNFVETYVDQVMTKSIEVHESILFEELPDTQKHIYDESSMREYERVPTLVVKAQMKIGKTVQLRNYLQKYYGNNSISKQQTIRFVTFRQIFSKNIQSRLPNFTLYSEVTGDLDSYERVIIQVESLFRLTSTAEPVDLLILDEVESIFNQFNSGLHKYFAPSFAIFMWMLETANYVICLDANLGNRTYNILQRFRGDVPIFFHWNQYKRAQHDTYYFTSSRETWLNNLLKDLLEDKKIVIPTNSLMEARLLQSFIQKKFPEKKIGFYSSKSTAHERESHFNNVSYYWGLVDILIYTPTISAGVSYEDKRFDVLYGFFNNMSCDVETCCQMLGRVRELKSKCYKICLQGKQNYYPETIEDIEMFTLQKRDTLFQTISNHQLSFTYSKETGRPIYYKTPYYHLWLETMRIQHLSKNHFITRFINQIADTGAKVFILTGEKLETVKQYTSIKMEIKHQDYVNIASAETIDANKALQIKQNLKEGITVDQQDLFAYEKYKLLEFYAWHGHKITPKFVEQYNSFMTKQNYTGRVQISRGKTVYESLTMLQTQELNFHQWAMQHAEHHDLQFNYSFQSHMYAIMLLTKCGFKCVQDPNILTNEQLMTKLVDEFVQYDLSAISFEFKLKKPNKTDPQTILKFINKVLGLRYGLKIHHNKGNYYIKNTKAGSLIPFVRQQIKQSPCVVSNLLPITETSSAKEETSPIKEETFTET

SEQ ID NO: 71 - protein, 146 aa, African swine fever virus
MGGTTDFVLSITIVLVILIIIAFIWYNFTGWSPFKYSKGNTVTFKTPDESSIAYMRFRNCVFTFTDPKGSLHSIDVTEVLNNMAKGFRDAQNPPSSFTLGGHCQAPLNAFSFVLPGVNDRATVATADEAKKWENCDATLTGLQRII

SEQ ID NO: 72 - protein, 103 aa, African swine fever virus
MGNRLIKKDLKKCEYYYGEQQNLKQIWRLLFNEPLGTYVVSSFLKKNYVVISFSCPTNTRIMHLRINICYDLYCINGEYYEKIDDFIRLYPHIFYRPLYRYKS

SEQ ID NO: 73 - protein, 962 aa, African swine fever virus
MGKPTLLEPGHLYNVPAEHKNDVPIHYIITWIKQRLPEFGGAIPTSLADRVLIIKSRTGSGKSTALPVHVFRILRNENTHSFQKYLGRSVICTQPRVLTAVTLAKDIGASTHYPDMILGQTVGYQTKPLTEKPNRGLIYATAGVLLAQLHTMTDDEIASRYAFMIIDEAHERALGIDLMLMYIKSMLQRMLQRGSIGALRIPFVILTSATIDTHKYSTYFGIGKENIILVEGRQYGVETHWPLYNTNNYIKTACETALTIHKENIHDRPTEADILIFMPGMAEIRFLSMLLNNANMDLAKEKLPLMLILPIDSEAIAQENEAYLGLKAEIKNLWVKNPLTAKVEKPLRRVIVSTVVAETGLTIETLKYVIDPGWNRSIETYYPEWAGGLITRPAAQSRIEQRKGRVGRVFPGHFYPLYTKHVFEQIPVQQYPEIITEGPGAIFLSIVVETIKKNKEGVFKAEEIDMLDPPPTDALASAIERAIVAGLLTRGEKGLQLTQLGDIASRFSFLSIEEARMCFSGYFWQAAISDIATILAVVSVADKKLTNLLDSKQRNGAMLAEAVLAGIPPFLQNIDNAYTNIHLLLADDLLEGLFIFEGFQHAIVYFINNKVNNVAKHLREWCEKKMLKYSSMVQILARREDILNELAIVGLNPFHQWQNRLASANAETFLKRVCTLKQCMYEAYRLNCFCYDEHRLLYTGRNGIHFSYHDAVIKNPSCIVTPRIMLSPVSKQYMEWRLEPSFVSVLDGFVNVDINFLLPRQEIPNILGGVENEEEEPPLPIQVFLHKYVKTHFHFSGKSFKELKMKPSQMIKFPETTLINMIPDIPKNVVQTYLEINVCHRYSFKRLIYCETFYTDMDDVQHENSVELIGLPMAAHHLTINDFNKLYHLLKPDGFLIMYDLHQGQEAFWLHSLQDALGHHTIRRDMDFHTIPEWETIFKECGFTPIFSKQPSEHELFIVFKK

SEQ ID NO: 74 - protein, 233 aa, African swine fever virus
MILIASPFSLAHLEYLHTWHVTIKNIAQQHGLDIKVAIVVSTSHLNNFLPISGALNIECITFPSCGIKEIDLLWARIKLFQHYCAIGARLLWLVSADIRPPVSAWPAIADSLKKGADAVVIPYPSRWNNLIPTVIKEIVVHQKKCLVAVDARHLDTDTQIVGAGMGCIVLTLKALMVRLSIGKQPVKILWPDLHGTAEGIPLEGVEVGWFLNAYAHKLNIRCLGADHIAQHLT

SEQ ID NO: 75 - protein, 171 aa, African swine fever virus
MVVYDLLVSLSKESIDVLRFVEANLAAFNQQYIFFNIQRKNSITTPLLITPQQEKISQIVEFLMDEYNKNNRRPSGPPREQPMHPLLPYQQSSDEQPMMPYQQPPGNDDQPYEQIYHKKHASQQVNTELNDYYQHILALGDEDKGMDSMLKLPEKAKRDSDDEDDMFSIKN

SEQ ID NO: 76 - protein, 962 aa, African swine fever virus
MREESWEDHDTIQLTAQRKYLAEVQALETLLTRELSVFLTEPGSKKTNIINRITGKTYALPSTELLRLYEHLEQCRKQGALMYFLERQGTYSGLMLDYDLKLNTNAVPPLEPPALSRLCHRIFVHIKNSSVLPEGSHKIHFFFTLKPEVVQGKYGFHVLIPGLKLAASTKKSIIGSLQHDATVQKILHEQGVTNPESCLDPHSASVPSLLYGSSKLNHKPYQLKTGFELVFDSSDPDYIPIHQIKNLESYNLVSELSLTNEQGSLVRPVYCAADIAAEKEEEIPTEDHSLSILMLHDPEARYLHKILNLLPPEYYVEYPLWSNVVFALANTSANYRPLAEWFSQKCPEKWNTGGKEKLEKLWNDASHHTEKKITKRSIMYWAHKHAPQQYKEIVEQGYFSILAEYVYSYNGMLEHYMIAKVIYAMMGNKFVVDVDSNGKYVWFEFVLPGQPMNQGEIWKWRKEVNPDELHIYISENFSRVMDRITEHIKYHLSQPHESNILNYYKKLLKAFERSKSKIFNDSFKKGVIRQAEFLFRQRSFIQTLDTNPHLLGVGNGVLSIETIPAKLINHFHEHPIHQYTHICYVPFNPENPWTKLLLNALQDIIPELDARLWIMFYLSTAIFRGLKEALMLLWLGGGCNGKTFLMRLVAMVLGDHYASKLNISLLTSCRETAEKPNSAFMRLKGRGYGYFEETNKSEVLNTSRLKEMVNPGDVTARELNQKQESFQMTATMVAASNYNFIIDTTDHGTWRRLRHYRSKVKFCHNPDPSNPYEKKEDPRFIHEYIMDPDCQNAFFSILVYFWEKLQKEYNGQIKKVFCPTIESETEAYRKSQDTLHRFITERVVESPSAETVYNLSEVVTAYAEWYNTNINVKRHIALELSQELENSVLEKYLQWSPNKTRILKGCRILHKFETLQPGESYIGVSTAGTLLNTPICEPKNKWWEWSPNPSAPPEKEASAPTP

SEQ ID NO: 77 - protein, 280 aa, African swine fever virus
MSSSLQELCRKKLPDCILPEFFDDYVLQLLGLHWQDHGSLQRIEKNQILVQQEPIHINEALKVAASEGNYEIVELLLSWEADPRYAVVGALESKYYDLVYKYYDQVKDCHDILPLIQNPETFERCHELNSTCSLKCLFKHAVINDMLPILQKYTDYLDRWEYCSQMLFELACSKKKYEMVVWIEGVLGVGKVTSLFTIAISNRDLQLYSLGYSIILENLYSCGQDPKFLLNHFLRDVSIKGLLPFVIKTIEYGGSKEIAITLAKKYQHKHILKYFETWES

SEQ ID NO: 78 - protein, 147 aa, African swine fever virus; identical to SEQ ID NO: 41

SEQ ID NO: 79 - protein, 858 aa, African swine fever virus
MCAGFYVAVHPWLEAQSLHKVGHTGNLAARLHDGSYTTCFTDEWKYCFTLETSTKKDAQKIEAGVLYCAQFFRVKNKELVCLLPEKIKQLAEDVANCLDISYTLCDSPAYEMNDSTIVVEPSLPSDPLISKEKLRHLVITPVEDEHFADDVLFFSTDETRTAIEDRLYQKEAANMGYQELRRSGRAILQMACRCGKTRVAYLILSNYLQGKVLYLVPGLSLLRQTLEKLYQYGISLKNVLLVGSDQTRIVLNHDNIEMTTNPVFIAKRIREAPSLLVIATYQSSTLLVDDFDLIISDECHRICGEWETRPFTHVLLNFKKGHRLFLTATPRYDTPLSMKNRELFGGVAFRYYLREGIEAGYVNDFELQMVAAPKLAHQPSTKEETTKQIIVKQIIMALAYLKTNIPAPKMLVFTRDIKQAKELYAALVDQGVYALIAHSTLPRQVILKTFTEFCSSKEPVILLNCRLFQEGVEVPELNAVFFAAPRHSPRDIIQSICRPLNKQVQKPHATIFLPLEVNTENVCLDRFSSIIPFADALASEDPRFYEHLLNPSEVAYPINWIGAHGSVSELLQLARHAIRYGTQGKIDRLTRSERLPWKAAFAELKRTVEICCRYPKINDGFHFGGATLRFDTWYKWVIKSYLQYKNKEPSSLEPYQVSDLESLQDWTTRGVGGPYPWEESMAFLETWLAQNKGELVAIDIHQGGWIGLDATPMERLSGVLTTVSQRDGRSYGKNKKLRPKKGFMIPPQQAQDLDRIFGKHNLKWRKDRVNGFLKEDEHGNYTGEPTCIQEAYRTFKEYVKTNPEYIEKYWPGYAKGKHKHQELPHIWEKGLAPPRYKAFKDGNKQLIQRSPKKKDIKN

SEQ ID NO: 80 - protein, 318 aa, African swine fever virus
MLHLIYISIIVVLIIILISYTRKPKYFRITAPRSVALFHGIHPLNPKNYKTFSEEFETILNNAIEDGDFKGQLTEPCSYALRGGKYIRPIILMEIVRACQLQHSFGAPIYPAEAALAAEYFHVASLIIDDMPSFDNDVKRRNKDTVWARFGVAKAQMSALALTMQGFQNICRQIDWIKEHCPRFPDPNQLGALLCTFVSHSLNSAGSGQLVDTPEKTIPFFKIAFIMGWVLGTGSVEDIGMIERAAHCFGHAFQLADDIKDHDTDTGWNYAKIHGKQKTFDDVAQSLQECKKILHGKKIFTSIWNEIFQKVINVALGT

SEQ ID NO: 81 - protein, 164 aa, African swine fever virus
MNVDFIAGINNLGEKIYTCEPFKTSFQNPFIVALIITAVVLVVFFAICNPPVDKKRKTKTAIYVYICIVALLFLHYYVLNHQLNDIYNKSNMDVIVSSIHDKYKGGDEIIPPISPPSVSNELEEDQPKKIPAGPKPADSKPVSLPDSKPLVPLQEVIMPSQYNN

SEQ ID NO: 82 - protein, 717 aa, African swine fever virus
MTKLAQWMFEQYVKDLNLKNRGSPSFRKWLTLQPSLLRYSGVMRANAFDILKYGYPMQQSGYTVATLEIHFKNIRSSFANIYWNRDSEEPEYVCCCATYQSHDGEYRYRFVWYQPFIEAYNAIEAALDPLETIILNLIAARDLDFVVHIFPYNKGHEDYLASTQLILKIFIATLLMDILRIKDNTLDVHLNSDYIIVMERLWPHIKDAIEHFFEAHKDLLGYLIAFRNGGNFAGSLRPSCGQKIVPLTIREVLQMNDINLAVWREVFIMQECSDLVINGIAPCFPIFNTWTYLQGINQIFFENTSLQEKFKKDFIARELSKEIIKGQKTLNDKEFKKLSLHQIQYMESFLLMSDVAIMITTEYVGYTLQSLPGIISRSSYLSPIVKNILMDEDSFMSLLFDLCYGAYVLHKKENVIHADLHLNNMTYYHFNPTSFTDRNKPGKYTLKVKNPVIAFITGPKVETETYVFKHIDGFGCIIDFSRAIMGPNHAIKLERQYGLAFVNTFYRNQSEHILKVLRYYFPEMLTNRENEIQGVILSNFNFFFNSITAIDFYAIARNLRSMLSLDYLHTSEVKRNVEISQTFLDTCQFLEEKAVEFLFKNLHTVLSGKPVEKTAGDVLLPIVFKKFLYPNIPKNILRSFTVIDVYNYNNIKRYSGKAIQTFPPWAQTKEILTHAEGRTFEDIFPRGELVFKKAYAENNHLDKILQRIREQLANENL

SEQ ID NO: 83 - protein, 359 aa, African swine fever virus
MEKIFQNVEIKPFLIDFSNLFIKNAAKKLFQLEEQLPLVPVNVVMDFKGISRAAVHGLSRVLQDEIPNYMLDIKPGGYKIEDSTDLFMTEQFIRNRINFIPIYAKNETLVFALRSLNNSCEVKTIYSRDLIQVAGPKLKYPIFNPTFEIGFLQPGKSLIIEDIYIKKGIGRKHAAFNLAVKTHFSHLDIEQYPTDKKEYMALSGYKQSSMTSDPRHHRLGLCFPAVPLPHINQAVRTYLKNACRIIIGRIQSIQKIYENFEEPQPELVLFSMDEEKTKAIITIKDETHTIGNLLKTYIYEMIPDISFVGYQCVPHKQEMVLTIIHKASQEDLITLLEKSIQNIIQTFQILEKNVDELIA

SEQ ID NO: 84 - protein, 317 aa, African swine fever virus
MVETQMDKLGFLLNHIGKQVTTKVLSNAHITQTMKEIILENHSVDGGAAKNVSKGKSSPKEKKHWTEFESWEQLSKSKRSFKEYWAERNEIVNTLLLNWDNVRGAIKKFLDDDREWCGRINMINGVPEIVEIIPSPYRAGENIYFGSEAMMPADIYSRVANKPAMFVFHTHPNLGSCCGGMPSICDISTTLRYLLMGWTAGHLIISSNQVGMLTVDKRIIVDLWANENPRWLMAQKILDIFMMLTSRRSLVNPWTLRDLKKILQDYGIEYIIFPSNDFFIYEDERLLMFSKKWTNFFTLHELLDDLETIETKASSTT

SEQ ID NO: 85 - protein, 542 aa, African swine fever virus
MFSLQELCRKNIYILPYPLAKHVLQQLGLYWKGHGSLQRIGDDHVLLQQDLIFSINEALRMAGEEGNNEVVKLLLLWEGNLHYAIIGALEGDRYDLIHKYYDQIGDCHKILPLIQDPQIFEKCHELSNSCNIRCLLEHAVKHDMLSILQKHKEQIRLHMALTQILFELACHERKNDIIRWIGYSLHIHHLETIFDVAFAHKNLSLYVLGYELLMHKVNTEAAYIELPNLLSYHLRTAAAGGLLNFMLETIKHGGYLDKTVLSAAIRYKHRKIVAHFIHQVPRKTVKKLLLYAVQARAPKKTLNLLLSSLNYSVHTITKQLVHNVVIYSSTLIVKLLLMRRKNKLNLVDAVLARLVKYSTYTDIVQFMGEFSVSPERVIKMAARESRTFLIEMISKAAWGNHPQTLIHHLKQLTNTMKPQSGKDHIIYTIHYIYLNSNMLVAEEEKNIFKLAKFYANHNAVNRFKQICEDYYILDARFKTLILECFEIAVQKNYPRIANIVDDYIRFLFYRGNITEEEIREAYSLKDAEVYVDLKWLQQGEMV

SEQ ID NO: 86 - protein, 475 aa, African swine fever virus
MDQEESHVISIFETLGAYFINIFYNFLYKNALYKKHSIVTEYQYQVKGYILGVKQNKKLYEKMLDSFYKYFCNITQINSKTLNFSNFVTTIVDSFIPKEYSQSISLEKKESILELLLCDYISNLGTFITTEKMLPFIIKNRKENYHKVTKEMQDYSLTFLLKKRMELYNKFLRKQAYVEPETELEETYARLSSYNRSLLHQIEELTSENKSLLADLSTLRKKYEKRQSEYRRLVQLLYQQIQRSSTSKSSYPLTKFIETLPSEHFSNEEYQKETPADQKEVVEMELLRKQELLTSQELTSKSPNNYPVPHSRTIVSKPLDNYPVPRSRTTTKIDFDNSLQNQELHTKNGFSEKDIVEFGQDKPEEENILAIDQDKPEEETILAIKQDISEEDNIFAIDQDKPEFNQDTPEFKEAVLDIKENILEEENQDEPIVQNPFLENFWKPEQKTFNQSGLFEESSNFSNDWSGGDVTLNFS

SEQ ID NO: 87 - protein, 357 aa, African swine fever virus
MLSLQTLAKKVVACNYLSSDYDYTLQRFGLWWDLGPIHLCNNCKQVFSYKHLQCFSEDDLCLEAALVKAVKSDNLELIRLFVDWGANPEYGLIRVPAVYLKRLCAELGGLTPVSEPRLLEILKEVARLKSCAGVLLGYDMFCHNPLLETVTRTTLDTVTYTCSNIPLTGDTAHHLLTKFWFALALRHNFTKAIHYFYKRHKNHLYWRVACSLYFNNIFDIHELCREKEICISPNLMMKFACLREKNYAAIYYCHRLGASLDYGMNLSIYNNNTLNMFFCIDLGAADFDRAQLIAHKAYMYNLSNIFLVKQLFSRDVTLVLDVTEPQEIYDMLKTYTSKNLKRAEEYLTAHPEIIVID

SEQ ID NO: 88 - protein, 526 aa, African swine fever virus
MFSLQDLCRKHLFILPDVFGEHVLQRLGLYWRCHGSLQRIGDDHILIRRDLILSTNEALRMAGEEGNNEVVKLLLLWKGNLHYAVIGALQGDQYDLIHKYENQIGDFHFILPLIQDANTFEKCHALERFCGVSCLLKHATKYNMLPILQKYQEELSMRAYLHETLFELACLWQRYDVLKWIEQTIHVYDLKIMFNIAISKRDLTMYSLGYIFLFDRGNTEATLLTQHLKKTAAKGLLHFVLETLKYGGNIDTVLTQAVKYNHRKLLDYFLRQLPRKHIEKLLLLAVQEKASKKTLNLLLSHLNYSVKRIKKLPRYVIEYESTLVIKILLKKRVNLIDAMLEKMVRYFSATKVRTIMDELSISPERVIKMAIQKMRTDIVIHTSYVWEDDLERLTRLKNMVYTIKYEHGKKMLIKVMHGIYKNLLYGEREKVMFYLAKLYVAQNAATQFRDICKDCYKLDVARFKPRFKQLILDCLEIITKKSCYSILEILEKHIISLFTMKVMTEEEKNLCLEILYKVIHYKTIQC

SEQ ID NO: 89 - protein, 412 aa, African swine fever virus
MEDTTFLEGANLAGITTLMNNLHINEQANLEELEKQVMGKQQSFPTDHFDEELNGLAKSLGINFNDPEFSLDSPHSIISKKPSGRGGDKVHGGIRRDSVCTDSICSDSVCSGSIRSGSIRSGSIRNGSIRSGSVRDGSIRNGSVRSGKTRRGLACNSSSRNDRGYSLSTHRKKYAESEASQKTAISKRDRKNHYAESEYSEKSIKPSTKQVDRLINHLRSNGDPNSFYKKDHDYERKTKLVKLEKINMLLTYLGNEQISTDDIKIPTIDSSMQEIDDVIEMLTLRNVGIRYSSIAEEILIGLARGLEIVFDGTREIPFLNYRPDYTGLHNTFMIKLFKMRYETSQVVGNLVQNMSPLSKICLELGPSLLLYPALIRTKHKASEDLYNLLQKGPEDPFTAYNEIHETLKKNNK

SEQ ID NO: 90 - protein, 353 aa, African swine fever virus
MSLPLSLQTLVKKTIASQCLSIDEHCILKYCGLWWHDAPLKLCMDRGRIQIKSGFLGEDIDLRVALIIAVKENNYSLIKLFTEWGANINYGLLSINTKHIRELCRQLGAKETLEDNDIFRIFTRIMHNKTSGSIILCHEIFMNNPILENKFVIQLRGLIYKRLWGLIEIKETDELNGLLVKYWYAKAVQYDCKDAICFLDEKYTDLNEWRLKCLLYYNKIYELHEMYHKENIQIDVHDMICLASTKDNNPLTIYYCYALGGNINQAMLTSVQYYNIGNIFFCIDLGGNAFEEGRAIAEQKGYNFLSHSLALDIYSSDASLPLNLKDPEEISSLLKDYKSKNLSIIWEYSHNIL

SEQ ID NO: 91 - protein, 111 aa, African swine fever virus
MSFSECPLVISACKKFLQKRITIENEALINALITALAQTSTLNDLCLLPIQTYLLSYKNAFEWIHFVCIAITTILDNKYNWKDCTVDINYIFLHVTYIYNIKTKEYLDYCS

SEQ ID NO: 92 - protein, 422 aa, African swine fever virus
MYTHVDVVGIAEASAALYVQKDRDRYLDVLTTIENFIYQHKCIITGESAHLLFLKKNIYLYEFYSNNVAEHSKALATLLYKLDPEYLTRYTVLITKIPNHWYVINVDQREFVRLYAIPAVKQHLPIPILPFYCTSALTQQELFCLGPELQLIQIYSKLCNPNFVEEWPTLLDYEKSMRMLFLEQFPQRLEMTGGKKEEKEKHESIIKKIILEMVSTRQRIVVGGYIQKNLYNHVLKNRNRLQLITSLNIYEEKDIIQQFCDSNGLKIKIRINNPLLPTNPELRRLTIYFNHNNDDDQSYLIVDMYNTGSYELVPTNQINTLDGSFLIGTPFVQARFLLVEIWVLMLIAQQTKKDTKKIIQFFINQYEMLMNSPWPSMEALFPSSSKRYLGNYVDPNALIKWAQLKLKRIPPFYPGKPDEESC

SEQ ID NO: 93 - protein, 418 aa, African swine fever virus
MSNYYYYYGGGRYDWLKTVEPTNFLKIGLPYQAHPLHLQHQATTPPSILEKFKRADILLNEVKAEMDPLMLQPETEKKLFQILSSIDMFKGLRKKVEFTYNAQIVTNAWLKMYELLNTMNFNNTSQAFCNCELPGGFISAINHFNYTMMHYPTFNWVASSLYPSSETDALEDHYGLYQCNPDNWLMQSPLLKKNIDYNNGDVTIASNVKNLALRATQRLTPIHLYTADGGINVGHDYNKQEELNLKLHFGQALTGLLSLSKGGNMILKHYTLNHAFTLSLICVFSHFFEELYITKPTSSRPTNSETYIVGKNRLRLFTPKEEQVLLKRLEFFNDTPLVDLSLYQNLLESVYFAVETIHLKQQIEFLNFGMKCYRHFYNKIKLLNDYLAPKKKIFQDRWRVLNKLYVLEKKHKLKLCAS

SEQ ID NO: 94 - protein, 339 aa, African swine fever virus
MIDQKIFETTLNIDDPTNFCTNVEAHLLKELENIYVGKCFKNSFILNITGVIQRSPCFIMRTNNSGRGYMHVRFSAVVSYLNAFDLIAAVKIIKNDSNIILGESLLTEPVTIVIPSSESQNNVAEVGQIVPVQLANSSVYYIPGRQQASATGSIFIPKHTFSVYHVQEELTQEQALNLTKLVNIIEMLLESRSKKDFKQICFFEKLYYTYSISSDEILDLKIWKGPKGKEMSRLKPCNVLSFLYDALKNKNSSLGFWARPPNLLKSSPLAYQQDQNSFNATELPIICSAEVMFVTLLKEIINYLQFINDLCDTFNNEQLIKRHENIWMLIEQRKIGHDF

SEQ ID NO: 95 - protein, 183 aa, African swine fever virus
MSVVVGGVEYSLNNWARYEIKRRAAELESVNYYPHCEYIMPEDIVVSILGSKPNCPFLEALKRFHDFLKKRRIIFKGEYLVIPWMGAQDVADMIHHVENRINLDHLEDLAHMLKLITYHRSFDTCINQAFEHLYAFKFPDANIETHELKHIRQLEKKMYGYILRLEKLQTVLTFYIEFLLKQV

SEQ ID NO: 96 - protein, 296 aa, African swine fever virus
MFGAFVSHRLWSDSGCTTTCITNSIANYVAFGEQIGFPFKSAQVFIAGPRKAVINIQEDDKVELLKMIVKHNLWVVAHGTYLDVPWSRKSAFVTHFIQQELLICKEVGIKGLVLHLGAVEPELIMEGLKKIKPVEGVVIYLETPHNKHHTYKYSTIEQIKELFLRIRNTRLKQIGLCIDTAHIWSSGVNISSYNDAGQWLRSLENIHSVIPPSHIMFHLNDAATECGSGIDRHASLFEGMIWKSYSHKIKQSGLYCFVEYVTRHQCPAILERNLGSSMQLQTALTAEFTTLKSLLK

SEQ ID NO: 97 - protein, 263 aa, African swine fever virus
MEDETELCFRSNKVTRLEMFVCTYGGKITSLACSHMELIKMLQIAEPVKALNCNFGHQCLPGYESLIKTPKKTKNMLRRPRKTEGDGTCFNSAIEASILFKDKMYKLKCFPSTGEIQVPGVIFPDFEDGKNIIQQWVDFLQHQPIEKKIQIIEFKTIMINFKFQINPVSPRVIIHLKKFAALLEHIPTPYPIREIKPPLEDSKVSAKFMVSPGKKVRINVFLKGKINILGCNTKESAETIYTFLKDLISVHWQEILCVLPVPD

SEQ ID NO: 98 - protein, 475 aa, African swine fever virus; identical to SEQ ID NO: 36

SEQ ID NO: 99 - protein, 243 aa, African swine fever virus
MKMHIARDSIVFLLNKYLQNTILTNKIEQECFLQADTPKKYLQYIKPFLINCMTKNITTDLVMKDSKRLEPYIILEMRDIIQMMFFRTLQKHMFFKEHTDLCTEYAQKIEASCYHYTYQQQEKTFLEEYSTRCGTINHIINCEKKSHQQQDNDALNKLISGELKPEAIGSMTFAELCPSAALKEKTEITLRSQQKVAEKTSQLYKCPNCKQRMCTYREVQTRALDEPSTIFCTCKKCGHEFIG

SEQ ID NO: 100 - protein, 179 aa, African swine fever virus
MEGEELIYHNIINEILVGYIKYYINDISEHELSPYQQQIKKILTYYDECLNKQVTITFSLTSVQEIKTQFTGVVTELFKDLINWGRICGFIVFSAKMAKYCKDANNHLESTVITTAYNFMKHNLLPWMISHGGQEEFLAFSLHSDMYSVIFNIKYFLSKFCNHMFFRSCVQLLRNCNLI

SEQ ID NO: 101 - protein, 115 aa, African swine fever virus
MGYTIQLDKDGDYCWDEDPTHHDPYMQANATSHVATSYATTSHAATPHAAAHHTFHEPFIKLNLTDKNIFNGLGFILIVIFIYLLLITLQQMLTRHIYNTVQHCVKAHLDSKNLQ

SEQ ID NO: 102 - protein, 1260 aa, African swine fever virus
MGNRGSSTSSRPLPSSEANIYAKLQDHIQRQTRPFSGGGYFNGGGDKNPVQHIKDYHIDSVSSKAKLRIIEGIIRAIAKIGFKVDTKQPIEDILKDIKKQLPDPRAGSTFVKNAEKQETVCKMIADAINQEFIDLGQDKLIDTTEGAASICRQIVLYINSLTHGLRAEYLDVHGSIENTLENIKLLNDAIKQLHERMVTEVTKAAPNEEVINAVTMIEAVYRRLLNEQNLQINILTNFIDNILTPTQKELDKLQTDEVDIIKLLNDTNSVLGTKNFGKVLSYTLCNLGIAASVANKINKALQKVGLKVEQYLQSKNWAEFDKELDLKRFSGLVSAENIAEFEKAVNLLRQTFNERHKILENSCAKKGGDEEKTPLDRRIEAQRLDRKHILMEFLNKSTQAYNDFLENVKKIGIKLVKEIALTPNITRLRDALSRINDMGTIALDLSLIGFYTNAAAREERETFLTQLTLVKNVLEEISKTDPNFKNLYDSCSRLLQIIDFYTDIVQKKYGGEEDCECTRVGGAALTVEELGLSKAARSQVDLNQAINTFMYYYYVAQIYSNLTHNKQEFQSYEENYATILGDAIAGRLMQLDTEKNARINSPAVDLARGHVGPNPGGAQEVDWKATVSAIELEYDVKRRFYRALEGLDLYLKNITKTFVNNIDSIQTVQQMLDGVRIIGRWFTETTGDTLAQVFESFPTSTGNDSNVFTDNAPAGHYYEKVAAEIQQGRSVGTLRPVRASQAKNIRDLIGRSLSNFQALKNIINAFARIGDMLGGEELRQMVPMSPLQIYKTLLEYLQHSALSVGLKNLNQSEIGGQRMALAQTAEEAAQRVYLSTVRVNDALSTRWETEDVFFTFMLKSMAAKIFIVLGIYDMFERPEPVYKLIPTRMILGGADELEPEVIPEAAELYFRLPRLAEFYQKLFSFRDENVQISMLPELEGIFSGLIRIIFMRPIELINIGDYSETEIRQLIKEINVIYQHFNLEYGEQEATKKALIHFVNEINRRFGVITRTEWEKFQRIVQEARTMNDFGMMNQTNYSILPDEDGYTQSSQLLPSDRFISPSTQPTPKWRPALYNIDSVDVQTGMLQPNSQWDLVQKFRKQLSEMFEDPSLQQELGKISYQELIRQAINELKKEHTDKIQIVSKLIQGSESLADTDVNKIFLFHETVITGLNLLSAIYVLLNNFRNNIKGLDLDTIQKSIIEWLRETQAANVNRANLIDWLGRKHGAISEIRNPGLVIKEINMRLSMVYPDPTTEAAAA

SEQ ID NO: 103 - protein, 1286 aa, African swine fever virus
GLDLDTIQKSIIEWLRETQAANVNRANLIDWLGRKHGAISEIRNPGLVIKEINMRLSMVYPDPTTEAAAAAQDRNLTTETLFAWIVPYVGIPAGGGVRPEQELAARYLVDNQRIMQLLLTNIFEMTSSFNKMVQVRFPETSTAQVHLDFTGLISLIDSLMADTKYFLDLLRPHIDKNIIQYYENRSNPGSFYWLEEHLIDKLIKPPTDAGGRPLPGGELGLEGVNQIINKTYTLLTKPYNVLQLRGGAQRRDAANIQINNNPQSSERFEQYGRVFSRLVFYDALENNSGLRVEQVALGDFRLSNLIRTNNAQEENTLSYWDNIALRTYANVNDAANNLRRYRLYGSDYGIQNNRSMMMVFNQLIASYITRFYDAPSGKIYLNLINAFANGNFSQAVMEMGYAHPDLARNNNVFGHRGDPTEQSVLLLSLGLILQRLIKDTNRQGLSQHLISTLTEIPIYLKENYRANLPLFNKMFNILISQGELLKQFIQYTNVQLARPNLTALLGANNDSVIYYNNNNVPATGLSVGQAALRGIGGVFRPNVTLMPLGDAQNNTSDVVRKRLVAVIDGIIRGSHTLADSAMEVLHELTDHPIYLETEEHFIQNYMSRYNKEPLMPFSLSLYYLHDLRIENNEVYDPLLYPNLESGSPEFKLLYGTRKLLGNDPVQLSDMPGVQLIMKNYNETVVAREQITPTRFEHFYTHAIQALRFIINIRSFKTVMMYNENTFGGVNLISENRDDKPIITAGIGMNAVYSLRKTLQDVISFVESSYQEEQINHIHKIVSPKGQTRTLGSNRERERIFNLFDMNIIPINVNALMRSIPLANIYNYDYSFEEIACLMYGISAEKVRSLDTTAPQPDVAEVLNIPNRPPINTREFMLKLLINPYVSVSITQYGNELLSKGNAGYMSRIFRGDNALNMGRPKFLSDQIFNKVLFGSLYPTQFDYDEAGPSLAAGIQRGRERWGHPMSIYINQALHEIVRTIRLAETVRGLRNVIDRNQIIGELNAFRTQLEDTRREVNNLIQTPEIQNNPTPEIIAAIQNWVQQYRGQITNLIDLIGNAGQANSMINLIQNITPQTAGAQLTALFNIRGLPAPPPRQALQNDIEAMQWFMTMVINHPPVLIAPFMLLVNNLKEFLNTLERYVYKTPRWLGPGTARIAQPPVGMAPGINMRHHTSYTENSVLTYITEQNREEGPWSIVKQVGVGIQKPTLVQIGKDRFDTRLIRNLIFITNIQRLLRLRLNLELSQFRNVLVSPDHIINPSITEYGFSITGPSETFSDKQYDSDIRIL

SEQ ID NO: 104 - protein, 1342 aa, African swine fever virus
MASGGAFCLIANDGKADKIILAQDLLNSRISNIKNVNKSYGKPDPEPTLSQIEETHLVHFNAHFKPYVPVGFEYNKVRPHTGTPTLGNKLTFGIPQYGDFFHDMVGHHILGACHSSWQDAPIQGTSQMGAHGQLQTFPRNGYDWDNQTPLEGAVYTLVDPFGRPIVPGTKNAYRNLVYYCEYPGERLYENVRFDVNGNSLDEYSSDVTTLVRKFCIPGDKMTGYKHLVGQEVSVEGTSGPLLCNIHDLHKPHQSKPILTDENDTQRTCSHTNPKFLSQHFPENSHNIQTAGKQDITPITDATYLDIRRNVHYSCNGPQTPKYYQPPLALWIKLRFWFNENVNLAIPSVSIPFGERFITIKLASQKDLVNEFPGLFVRQSRFIAGRPSRRNIRFKPWFIPGVINEISLTNNELYINNLFVTPEIHNLFVKRVRFSLIRVHKTQVTHTNNNHHDEKLMSALKWPIEYMFIGLKPTWNISDQNPHQHRDWHKFGHVVNAIMQPTHHAEISFQDRDTALPDACSSISDISPVTYPITLPIIKNISVTAHGINLIDKFPSKFCSSYIPFHYGGNAIKTPDDPGAMMITFALKPREEYQPSGHINVSRAREFYISWDTDYVGSITTADLVVSASAINFLLLQNGSAVLRYSTGSGATNFSLLKQAGDVEENPGPMADFNSPIQYLKEDSRDRTSIGSLEYDENADTMIPSFAAGLEEFEPIPDYDPTTSTSLYSQLTHNMEKIAEEEDSNFLHDTREFTSLVPDEADNKPEDDEESGAKPKKKKHLFPKLSSHKSKGSGATNFSLLKQAGDVEENPGPMAEFNIDELLKNVLEDPSTEISEETLKQLYQRTNPYKQFKNDSRVAFCSFTNLREQYIRRLIMTSFIGYVFKALQEWMPSYSKPTHTTKTLLSELITLVDTLKQETNDVPSESVVNTILSIADSCKTQTQKSKEAKTTIDSFLREHFVFDPNLHAQSAYTCADTNVDTCASMCADTNVDTCASMCADTNVDTCASTCTSTEYTDLADPERIPLHIMQKTLNVPNELQADIDAITQTPQGYRAAAHILQNIELHQSIKHMLENPRAFKPILFNTKITRYLSQHIPPQDTFYKWNYYIEDNYEELRAATESIYPEKPDLEFAFIIYDVVDSSNQQKVDEFYYKYKDQIFSEVSSIQLGNWTLLGSFKANRERYNYFNQNNEIIKRILDRHEEDLKIGKEILRNTIYHKKAKNIQETGPDAPGLSIYNSTFHTDSGIKGLLSFKELKNLEKASGNIKKAREYDFIDDCEEKIKQLLSKENLTPDEESELIKTKKQLDNALEMLNVPDDTIRVDMWVNNNNKLEKEILYTKAEL

SEQ ID NO: 105 - protein, 1239 aa, African swine fever virus
MPSNMKQFCKISVWLQQHDPDLLEIINNLCMLGNLSAAKYKHGVTFIYPKQAKIRDEIKKHAYSNDPSQAIKTLESLILPFYIPTPAEFTGEIGSYTGVKLEVEKTEANKVILKNGEAVLVPAADFKPFPDRRLAVWIMESGSMPLEGPPYKRKKEGGGNDPPVPKHISPYTPRTRIAIEVEKAFDDCMRQNWCSVNNPYLAKSVSLLSFLSLNHPTEFIKVLPLIDFDPLVTFYLLLEPYKTHGDDFLIPETILFGPTGWNGTDLYQSAMLEFKKFFTQITRQTFMDIADSATKEVDVPICYSDPETVHSYANHVRTEILHHNAVNKVTTPNLVVQAYNELEQTNTIRHYGPIFPESTINALRFWKKLWQDEQRFVIHGLHRTLMDQPTYETSEFAEIVRNLRFSRPGNNYINELNITSPAMYGDKHTTGDIAPNDRFAMLVAFINSTDFLYTAIPEEKVGGNETQTSSLTDLVPTRLHSFLNHNLSKLKILNRAQQTVRNILSNDCLNQLKHYVKHTGKNEILKLLQEGSGATNFSLLKQAGDVEENPGPMDFILNISMKMEVIFKTDLRSSSQVVFHAGSLYNWFSVEIINSGRIVTTAIKTLLSTVKYDIVKSARIYAGQGYTEHQAQEEWNMILHVLFEEETESSASSENIHEKNDNETNECTSSFETLFEQEPSSEVPKDSKLYMLAQKTVQHIEQYGKAPDFNKVIRAHNFIQTIYGTPLKEEEKEVVRLMVIKLLKKISFYLTYIGSGATNFSLLKQAGDVEENPGPMDSEFFQPVYPRHYGECLSPVTTPSFFSTHMYTILIAIVVLVIIIIVLIYLFSSRKKKAAAIEEEDIQFINPYQDQQWVEVTPQPGTSKPAGATTASVGKPVTGRPATNRPATNKPVTDNPVTDRLVMATGGPAAAPAAASAPAHPAEPYTTVTTQNTASQTMSAIENLRQRNTYTHKDLENSLGSGATNFSLLKQAGDVEENPGPMFSNKKYIGLINKKEGLKKKIDDYSILIIGILIGTNILSLIINIIGEINKPICYQNDDKIFYCPKDWVGYNNVCYYFGNEEKNYNNASNYCKQLNSTLTNNNTILVNLTKTLNLTKTYNHESNYWVNYSLIKNESVLLRDSGYYKKQKHVSLLYICSKGSGATNFSLLKQAGDVEENPGPMPTKAGTKSTANKKTTKGSSKSGSSRGHTGKTHASSSMHSGMLYKDMVNIARSRGIPIYQNGSRLTKSELEKKIKRSK

SEQ ID NO: 106 - protein, 1223 aa, African swine fever virus
MVEPREQFFQDLLSAVDQQMDTVKNDIKDIMKEKTSFMVSFENFIERYDTMEKNIQDLQNKYEEMAANLMTVMTDTKIQLGAIIAQLEILMINGTPLPAKKTTIKEAMPLPSSNTNNEQTSPPASGKTSETPKKNPTNAMFFTRSEWASSNTFREKFLTPEIQAILDEQFANKTGIERLHAEGLYMWRTQFSDEQKKMVKEMMKKGSGATNFSLLKQAGDVEENPGPMSTKKKPTITKQELYSLVAADTQLNKALIERIFTSQQKIIQNALKHNQEVIIPPGIKFTVVTVKAKPARQGHNPATGEPIQIKAKPEHKAVKIRALKPVHDMLNGSGATNFSLLKQAGDVEENPGPMIILIFLIFSNIVLSIDYWVSFNKTIILDSNITNDNNDINGVSWNFFNNSFNTLATCGKAGNFCECSNYSTSIYNITNNCSLTIFPHNDVFDTTYQVVWNQIINYTIKLLTPATPPNITYNCTNFLITCKKNNGTNTNIYLNINDTFVKYTNESILEYNWNNSNINNFTATCIINNTISTSNETTLINCTYLTLSSNYFYTFFKLYYIPLSIIIGITISILLISIITFLGSGATNFSLLKQAGDVEENPGPMNKKIIVMMALLHKEKLIECIYHELENGGTILLLTKNIVVSEISYIGNTYKYFTFNDNHDLISKEDLKGATSKNIAKMIYNWIIKNPQNNKIWSGEPRTQIYFENDLYHTNYNHKCIKDFWNVSTSVGPHIFNDRSIWCTKCTSFYPFTNIMSPNIFQGSGATNFSLLKQAGDVEENPGPMLHWGPKYWRSLHLYAIFFSDAPSWKEKYEAIQWILNFIESLPCTRCQHHAFSYLTKNPLTLNNSEDFQYWTFAFHNNVNNRLNKKIISWSEYKNIYEQSILKTIEYGKTDFIGAWSSLGSGATNFSLLKQAGDVEENPGPMNIIRKLKPGTISLVLGPMFAGKTTFLIHCIYMLERLEKKVVFIKSTKNTRDKTIKTHSGIQLRPKQCKIIESTQLSDVGSLTDIHAVVVDEAHFFDDLITCRTWAEEEKIIILAGLNASFEQKMFPPIVRIFPYCSWVKYIGRTCMKCNQHNACFNVRKNADKTLILAGGSELYVTCCNNCLKNTFIKQLQPIKYGSGATNFSLLKQAGDVEENPGPMLIPVVCFTCGFPIGTYAAIFDKARTEYIKTKMGGTLPQNIPLDASLQIELKDLITALGIPMRVCCRTHLITTLDYRKYY

SEQ ID NO: 107 - protein, 1366 aa, African swine fever virus
MYHDYASKLLADYRSDPPLWESDLPRHNRYSDNILNSRYCGNKNGAAPVYNEYTNSPEKAEKGLQLSDLRNFSFMLNPQHKNIGYGDAQDLEPYSSIPKNKLFNHFKNHRPAFSTHTENLIRRNVVRTEKKTFPQVASLKGTQKNCLTQPSSLPSLKNPKNSSVPSTRFSEHTKFFSYEDLPKLRTKGTIKHEQHLGDQMPGQHYNGYIPHKDVYNILCLAHNLPASVEKGIAGRGIPLGNPHVKPNIEQELIKSTSTYTDVPMLGPLPPKDSQHGREYQEFSANRHMLQVSNILHSVFANHSIKPQILEDIPVLNAQLTSIKPVSPFLNKAYQTHYMENIVTLVPRFKSIANYSSPIPNYSKRNSGQAEYFDTSKQTISRHNNYIPKYTGGIGDSKLDSTFPKDFNASSVPLTSAEKDHSLRGDNSACCISSISPSLGSGATNFSLLKQAGDVEENPGPMSRPEQQLKKMLKNPQAQYAFYPTAKVERISTTQHMYFIATRPMFEGGRNNVFLGHQVGQPIIFKYVSKKEIPGNEVIVLKALQDTPGVIKLIEYTENAMYHILIIEYIPNSVDLLHYHYFKKLEETEAKKIIFQLILIIQNIYEKGFIHGDIKDENLIIDINQKIIKVIDFGSAVRLDETRPQYNMFGTWEYVCPEFYYYGYYYQLPLTVWTIGMVAVNLFRFRAENFYLNDILKRENYIPENISETGKQFITECLTINENKRLSFKSLVSHPWFKGLKKEIQPISELGVDYKNVITGSGATNFSLLKQAGDVEENPGPMLNQFPGQYSNNIFCFPPIESETKSGKKASWIICVQVVQHNTIIPITDEMFSTDVKDAVAEIFTKFFVEEGAVRISKMTRVTEGKNLGKKNATTVVHQAFKDALSKYNRHARQKRGAHTNRGIIPPMLVKYFNIIPKTFFEEETDPIVQRKRNGVRAVACQQGDGSILLYSRTKKEFLGLDNIKKELKQLYLFIDVRVYLDGELYLHRKPLQWIAGQANAKTDSSELHFYVFDCFWSDQLQMPSNKRQQLLTNIFKQKEDLTFIHQVENFSVKNVDEALRLKAQFIKEGYEGAIVRNANGPYEPGYNNYHSAHLAKLKPLLDAEFILVDYTQGKKGKDLGAILWVCELPNKKRFVVTPKHLTYADRYALFQKLTPALFKKHLYGKELTVEYAELSPKTGIPLQARAVGFREPINVLEIIGSGATNFSLLKQAGDVEENPGPMDHYLKKLQDIYTKLEGHPFLFSPSKTNEKEFITLLNQALASTQLYRSIQQLFLTMYKLDPIGFINYIKTSKQEYLCLLINPKLVTKFLKITSFKIYINFRLKTFYISPNKYNNFYTAPSEEKTNHLLKEEKTWAKIVEEGGEES

SEQ ID NO: 108 - protein, 1387 aa, African swine fever virus
MDEIINKYQAVEKLFKEIQQGLAAYDQYKTLISEMMHYNNHIKQEYFNFLMIISPYLIRAHSGETLRNKVNNEIKRLILVENINTKISKTLVSVNFLLQKKLSTDGVKTKNMWCTNNPMLQVKTAHNLFKQLCDTQSKTQWVQTLKYKECKYCHTDMVFNTTQFGLQCPNCGCIQELMGTIFDETHFYNHDGQKAKSGIFNPNRHYRFWIEHILGRNPEQELGTKQDPCGTKVLQQLKKIIKRDNKCIALLTVENIRKMLKEINRTDLNNCVSLILRKLTGVGPPQISESILLRGEYIFTEAIKIREKVCKKGRINRNYYPYYIYKIFDAILPPNDTTNRRILQYIHLQGNDTLANNDSEWESICMELPEIKWKPTDRTHCVHFFGSGATNFSLLKQAGDVEENPGPMLIFISNMEELLIENSQRFTIFPIQHPECWNWYKKLESLTWTAQEVDMCKDIDDWEAMPKPQREFYKQILAFFVVADEIVIENLLTNFMREIKVKEVLYFYTMQAAQECVHSEAYSIQVKTLIPDEKEQQRIFSGIEKHPIIKKMAQWVRQWMDPDRNTLGERLVGFAAVEGILFQNHFVAIQFLKEQNIMPGLVSYNEFISRDEGMHCSFACFLISNYVYNIPEEKIIHKILKEAVELVDEFINYAFDKARGRVPGFSKEMLFQYIRYFTDNLCFMMQCKSIYKVGNPFPQMTKFFLNEVEKTNFFELRPTQYQNCVKDDAFAFKLFLNDDDFGSGATNFSLLKQAGDVEENPGPMTTHIFHADDLLQALQQAKAEKNFSSVFSLDWDKLRTAKRNTTVKYVTVNVIVKGKKAPLMFNFQNEKHVGTIPPSTDEEVIRMNAENPKFLVKKRDRDPCLQFNKYKISPPLEDDGLTVKKNEQGEEIYPGDEEKSKLFQIIELLEEAFEDAVQKGPEAMKTKHVIKLIQRKISNSAVKNADKPLPNPIARIRIKINPATSILTPILLDKNKPITLQNGKTSFEELKDEDGVKANPDNIHKLIESHSIHDGIINARSICISNMGISFPLCLEMGVVKVFEKNNGIDVNSIYGSDDISTLVNQIAIAGSGATNFSLLKQAGDVEENPGPMVNLFPVFTLIVIITILITTRELSTTMLIVSLVTDYIIINTQYTEQQHENNTFFMPQKNSFNESYNKDKKSNIHIPYQWLAPELKEAESKYWWGNYDPHSEPVLAGASGSGATNFSLLKQAGDVEENPGPMVNPNKRIMNKKSKQASISSILNFFFFYIMEYFVAVDNETSLGVFTSIEQCEETMKQYPGLHYVVFKYMCPADAENTDVVYLIPSLTLHTPMFVDHCPNRTKQARHVLKKINLVFEEESIENWKVSVNTVFPHVHNRLSAPKLSIDEANEAVEKFLIQAGRLMSL

SEQ ID NO: 109 - protein, 1302 aa, African swine fever virus
METFFIETLASDVYGKALNVDLDRLSQAQVKYTLQELISYCSALTILHYDYSTLAARLSVYQLHQSTASSFSKAVRLQAAQSCSRLSPQFVDVVYKYKAIFDSYIDYSRDYKLSLLGIETMKNSYLLKNKDGVIMERPQDAYMRVAIMIYGMGRVVNMKMILLTYDLLSQHVITHASPTMFNAGTKKPQLSSCFLLNVNDNLENLYDMVKTAGIISGGGGGIGLCLSGIRAKNSFISGSGLKSNGIQNYIVLQNASQCYANQGGLRPGAYAVYLELWHQDIFTFLQMPRLKGQMAEQRLNAPNLKYGLWVPDLFMEILEDQIHNRGDGKWYLFSPDQAPNLHKVFDLERSQHENAHREFKKLYYQYVAEKRYTGVTTAKEIIKEWFKTVVQVGNPYIGFKDAINRKSNLSHVGTITNSNLCIEVTIPCWEGDKAEQGVCNLAAVNLAAFIRENGYDYRGLIEASGNVTENLDNIIDNGYYPTEATRRSNMRHRPIGIGVFGLADVFASLKMKFGSPEAIAMDEAIHAALYYGAMRRSIELAKEKGSHPSFPGSAASKGLLQPDLWVRCGDLVSSWEERVAQTTQGVLTPKRWSQLRLAAMQGLRNGYVTALMPTATSSNSTGKNECFEPFTSNLYTRRTLSGEFIVLNKYLIDDLKEINLWTEAIQQQLLNAGGSIQHILDIPAEIRDRYKTSREMNQKILTKHAAARNPFVSQSMSLNYYFYEPELSQVLTVLVLGWKKGLTTGSYYCHFSPGAGTQKKIIRNSEKACNADCEACLLGSGATNFSLLKQAGDVEENPGPMSILEKITSSPSECAEHLTNKDSCLSKKIQKELTSFLEKKETLGCDSESCVITHPAVKAYAQQKGLDLSKELETRFKAPGPRNNTGLLTNFNIDETLQRWAIKYTKFFNCPFSMMDFERVHYKFNQVDMVKVYKGEELQYVEGKVVKRPCNTFGCVLNTDFSTGTGKHWVAIFVDMRGDCWSIEYFNSTGNSPPGPVIRWMERVKQQLLKIHHTVKTLAVTNIRHQRSQTECGPYSLFYIRARLDNVSYAHFISARITDEDMYKFRTHLFRIAGSGATNFSLLKQAGDVEENPGPMGNKESKYLEMCSEEAWLNIPNIFKCIFIRKLFYNKWLKYQEKKLKKSLKLLSFYHPKKDFVGIRDMLQMAPGGSYFITDNMTEEFLMLVVKHPEDGSAEFTKLCLKGSCIVIDGYYYDNLHIFISETPDIYKYPLIRYDRMDIKRALILFLLFLVVLSNAFVDYIISNFNHAVTCRKPTYFGIVLQGIFLVILFSIVDYLINENIL

SEQ ID NO: 110 - protein, 1229 aa, African swine fever virus
MASLDNLVARYQRCFNDQSLKNSTIELEIRFQQINFLLFKTVYEALVAQEIPSTISHSIRCIKKVHHENHCREKILPSENLYFKKQPLMFFKFSEPASLGCKVSLAIEQPIRKFILDSSILVRLKNRTTFRVSELWKIELTIVKQLMGSEVSAKLAAFKTLLFDTPEQQTTKNMMTLINPDDEYLYEIEIEYTGKPESLTAADVIKIKNTVLTLISPNHLMLTAYHQAIEFIASHILSSEILLARIKSGKWGLKRLLPQVKSMTKADYMKFYPPVGYYVTDKADGIRGIAVIQDTQIYVVADQLYSLGTTGIEPLKPTILDGEFMPEKKEFYGFDVIMYEGNLLTQQGFETRIESLSKGIKVLQAFNIKAEMKPFISLTSADPNVLLKNFESIFKKKTRPYSIDGIILVEPGNSYLNTNTFKWKPTWDNTLDFLVRKCPESLNVPEYAPKKGFSLHLLFVGISGELFKKLALNWCPGYTKLFPVTQRNQNYFPVQFQPSDFPLAFLYYHPDTSSFSNIDGKVLEMRCLKREINHVSWEIVKIREDRQQDLKTGGYFGNDFKTAELTWLNYMDPFSFEELAKGPSGMYFAGAKTGIYRAQTALISFIKQEIIQKISHQSWVIDLGIGKGQDLGRYLDAGIRHLVGIDKDQTALAELVYRKFSHATTRQHKHATNIYVLHQDLAEPAKEISEKVHQIYGFPKEGASSIVSNLFIHYLMKNTQQVENLAVLCHKLLQPGGMVWFTTMLGEQVLELLHENRIELNEVWEARENEVVKFAIKRLFKEDILQETGQEIGVLLPFSNGDFYNEYLVNTAFLIKIFKHHGFSLVQKQSFKDWIPEFQNFSKSLYKILTEADKTWTSLFGFICLRKNGSGATNFSLLKQAGDVEENPGPMAGRVKIKQKELIDSTVKNKNVMNLFHEIIGSKGNINFSVVWPKFKKIKQSVYDYISTLSVLEKANVMQNFEADKKLLELFVQKLWAAYEGYFKYPEIEKYEVEGQVNFNLVPQCVLEKFSQLYRIRINSELVTLILNSCAFMSKYNDYILKKDPYILTITPGLCFSPIPNFEDLNFKHLYNSDKNSQHDKEFIMFILYKLYTAALGVYNAISIPDIDVEDLENIILSSVSQIKKQIPRCKDAFNKIESSVHLLRKNFNTYYSDYVGSGYNPTIIMEQYIKDISQDSKNISPRISYQFRTIIKYYRDMIATRHQTMDPQVLNLVKHVEKKLDMLDREKN

SEQ ID NO: 111 - protein, 1319 aa, African swine fever virus
MLRVFIFFVFLGSGLTGRIKPQVTCKYFISENNTWYKYNVTILNSSIVLPAYNTIPSNAAGISCTCHDIDYLQKNNISIHYNTSILKTFQDIRIIRCGMKNISEIAGGFGKELKFLDLRYNDLQVIDYNILRKLIRSNTPTYLYYNNLMCGKRNCPLYYFLLKQEQTYLKRLPQFFLRRINFSNNNTFLYHFLSCGNKPGHEFLEYQTKYCRTKFPEINITVNQLIAKKNTERYKSCYPLVFISILCSCISFLFLFICLLRSICKKYSCTKQDKSSHNYIPLIPSYTFSLKKHRHPETAVVEDHTTSANSPIVYIPTTEEKKVSCSRRKGSGATNFSLLKQAGDVEENPGPMFPKINTIDPYISLRLFEVKPKYVGYSSIDARNQSFAIHDIKNYEKFSNAGLFYTSPTEITCYCCGMKFCNWLYEKHPLQVHAFWSRNCGFMRATLGIIGLKKMIDSYNDYYNNEVFVKHQNRVYTHKRLEDMGFSKPFMRFILANAFIPPYRKYIHKIILNERYFTFKFAAHLLSFHKVNLDNQTTYCMTCGIEPIKKDENFCNACKTLNYKHYKTLNFSVKLGSGATNFSLLKQAGDVEENPGPMFSLQDLCRKNIFFLPNDFSKHTLQWLGLYWKEHGSVHRAEKDSIMIQNELVLSINDALQLAGEEGDTDVVQLLLLWEGNLHYAIIGALKTEKYNLICEYHSQIQDWHILLPMIQDPETFEKCHDLSLGCDFICLLQHAVKYNMLSILVKYKEDLLNARIRHRIQSLFVLACENRRIEIIDWIGQNLPIPEPDAIFSIAVATRDLELFSLGYKIIFDYMQRQGIIQLTNGVRMVVLNRHISMAIDNGLLPFVLETLKHGGNIHRALSYAVTHNRRKILDYLIRQKNIAPNTIERLLYLAVKNQSSRKTLNLLLSYINYKVKNVKKLVEHVVNEKSTLVLKILLEKKENLVDAVLTRLVKHSTYFQVREFIQEFSISPEKFIKIAVREKKNVLIEAISEDIWENPTERITYLKQIVHTIKYESGRRFLVDIIHSIYQSYSLKHEDILKLATFYVKHNAITHFKDLCKYLWLNRGTESKKLFLECLEIADEKEFPDIKSIVSEYINYLFTAGAITKEEIMQAYDALEGSGATNFSLLKQAGDVEENPGPMETNCPNILYLSGITIEECLQSKKTATDTLNTNDDEAEVEKKLPSVFTTVSKWVTHSSFKCWTCHLYFKTVPKFVPTYMRENERGEIEMGVLGNFCSFSCAASYVDVHYTEPKRWEARELLNMLYRFFTSQWISYIKPAPSYTMRKEYGGKLSEEAFISELHTLEESISSKHIFI

SEQ ID NO: 112 - protein, 1364 aa, African swine fever virus
MTSLLKTDFNVSKYRLIAQKREANAVEIEAALEVVREFIIKKKLILYGGIAIDYALHLKGSSIYPEGERPDFDMFSPNHVEDAYELADILYEKGFKQVGTVRAIHVQTMRVRTDFVWVADLSYMPPNIFNTIPTLTYKNLKIIHPDYQRAGLHLAFCFPFDNPPREDVFSRFKKDLQRYNLIEKYYPIPVVPVKSTYESKTFSIPFKQVAIHGFAAYALLYQTLNELRITCKVPEWKTEFPQPSYSYHKNDKNITLTVDMPKAYPALVLATYNPEEVIKEMGLHLTEICEPYMDYSPPIFKTNDIHFFSTMFKELAISIIQDNLIVVSPQYLLLYFLYGAFATPADKSLFLFYYNATLWILEKADSLLNIIQKQTSPEEFTRFANTSPFVLTTRVLSCSQERCTFSPAYRISLANDVQQSQLPLPKTHFLSNSLPDVSTLPYNYYPGKGKDRPTNFSYEKNLLFNIGGKCTPSAMGSGATNFSLLKQAGDVEENPGPMALTTHSGKLIPELQFKAHHFIDKTTVLYGPSKTGKTVYVKHIMKILQPHIEQILVVAPSEPSNRSYEGFVHPTLIHYRLWLADKQKKNDNKGAERFLEAIWQRQTMMSSIYSRVNNIDMLKTLYHKLPIDIQQKENKNIAKVECLKAEQTDQKKEEKITSLYQQLLKKIIIQNIHMYKNLCLTEDEKFTLNYINLNPRLLLILDDCAAELHPLFTKEIFKKFFYQNRHCFISMIICCQDDTDLPANLRKNAFVSIFTNASICMSNFSRQSNRYSKQDKEYVEEISHIVFKGYRKLVYIREDEHRQHFYHSTVPLPTAFSFGSKALLKLCKAVYSKEVVIDKSNPYWSKFRLNFGSGATNFSLLKQAGDVEENPGPMETFVRLFKDSPQQRSDAWHAIRRTQVGGSDLASVLGLNPYKSYYITLAEKANLFKKNLNRAACSWGTLFERVSKDLLELFCQTTVIGDNIHIDGTYLGYPGHSNSPDGFCHLTLGYTQQSWEIKTIFNNVRYEATKRIPVLVEIKSPFNRKIKNSVPSYYMPQIQSGLALSPPISMGIYVEAMFRVCGIHQLGSNNETNTDIHPPESMLPLAWGIITICSTQEHTEAPQDFGTLDAETFRQLLETLYQKDQYTIHYSMPYETACPEMPNVVGYFGWKVFIFQIIPVMKHPQFLKDKYPIIQQFLRDLHTIKASPSPMEMYEKICCSEESALSTEDIDNFTDMLTGSGATNFSLLKQAGDVEENPGPMNLEYVQVVQKFNQVLLELTKKVCTVVGGSKPTYWYHHIRRVCSECPSMPMSMIGPYLNVYKAQILTRDKNFFMNFDPAHNEYTFIIQKLKEAARNMPEDELEQYWVKLLFLLKSYIKCKPFIN

SEQ ID NO: 113 - protein, 1323 aa, African swine fever virus
MDALLKEIEKLSQPSLQKENNDVCDLCFMQMKKISNYQLLCEECGQLKDWFEPEYNEKFTVYSRLKIVGANSSYHQRDLDKANSSDYSSLQFHHILEELKSLNVKYMDAGQKPFPIQVLKETAHSYNQVQQHRVIRSITKLQILASILRSICLKLNIACTVADAARFTQLNTKGISRGMDLLRSLFVDNKITLNVDLNPIDSFINSTYSALQIKQIHQELQEENVYNLKEIVKSFILYADEKNIGVDLNRRTVVIATMYNVLRRAYYPIEIDTVVYQCKIRKNTITRALKMYEDYYSHFKSLYEQYHLNAAKKLIGSGATNFSLLKQAGDVEENPGPMADNDNEDLIMDDLVEEYVETEEENLVDSEEESEDKDEIVESPSICEGFVQASSQTLVIIPDNERITSNVLTTFEATRLVAVRAQQLAINGSTMLKKKYSSPIDIAKQELFNRKIPLLVMRCIKVTPEGQKIVEIWNPREMGIPLLDGSGATNFSLLKQAGDVEENPGPMFSLQDLCRKNTFFLPSDFSKHTLHLLGLYWKGHGSIQRIKNDGVLIEHDLTLSINEALILAGEEGNNEVVKLLLLWEGNLHYAIIGALRTENYNLVCEYHSQIQDWHVLLPLIQDPETFEKCHDLSLECDLSCLLQHAVKYNMLSILVKYKEDLLNVLFRQQIQGLFILACENRKLEILTWMGQNLPIPDPEPIFSIAVVTKDLEMFSLGYKIVFEYMENQGLHLTQVVRMVMLNHHFGMVINKGLLPFVLEILNYGGNVNRALSYAVTQNKRKILDHVVRQKNIPHKTIERMLHLAVKKHAPRKTLNLLLSYINYKVKNVKKLLEHVVKYNSTLVIRLLLEKKKNLLDATLTRYVKDSTYFQVKEFMQDFSISPEKFIKIAVREKRNVLIKGISEDIWENPAERIRNLKQIVCTIKYESGRQFLINIIHTIYQSYSLKPEEILKLATFYVKHNATTHFKDLCKYLWLNRRTESKKLFLECLEIADKKEFPDIKSIVSEYINYLFTAGAITKEEIMQAYALEYAMYGSGATNFSLLKQAGDVEENPGPMVSLTTCCLKNIVNQHAYVENTVLLYHLGLRWNCKTLYQCTQCNGVNYTNSHSDQCKNKDLFLIKVIVKKNLAVARTLLSWGASPEYARLFCRNTEEEQALNVQHVADVPSSKILERLTMSYKGNDEQLLITFYLLNLSTNFSTNLREQVRFKIVSYIICDLAIHQTFKIFYAKNYSLSTLYCIFLAIYYKLYTALRKMVKIYPGLKSFAYLTGFMFDDETVMETYNSTDDEISECKNRIITIKGYYGNIHCRSDIDHMYAFSQNNFW

SEQ ID NO: 114 - protein, 1371 aa, African swine fever virus
MNSLQVLTKKVLIENKAFSNYHEDDIFILQQLGLWWENGPIGFCKQCKMVTSGSMSCSDVDSYELDRALVRAVKKNQTDLIKLFVLWGANINYGIICAKTERTKVLCIQLGADPKFLDVGLYNMFVDLIKQQKVLLAIDIYYDNISILDSFDSHDFYVLIDFIYNRFILNLDEKEKMIKNTYVLKFWFKIAIEFNLIKPIRFLSKKFPHLDYWRLKTAVYLGNVDEIHHAYFQENIRLDPNDMMSLACMYPQNKLGIYYCFALGANINTALETLIGFINHEVNREITFFSNYGIWSNVHFCISLGANPYTKKIQETLLRQEKNVMMKLLFKKGLLSPHSILHKKILEPSEVRKIISTYEYTETFHSFSSLRDNLRGSGATNFSLLKQAGDVEENPGPMLPSLQSLTKKVLAGQCVPTNQHYLLKCYDLWWHDAPITFDHNLRLIKSAGIKEGLNLNTALVKAVRENNYNLIKLFAEWGADINYGLVSVNTEHTWDLCRELGAKETLNEEEILQIFIDLKFHKTSSNIILCHEVFSNNPILQKVNNIKMRIEIFWELRELIVKTDLLNNEFSLSTLLLKYWYAIAIRYNLKEAIQYFYQKYTHLNTWRLTCALCFNNVFDLHEAYEKDKIHMDIEEMMRIACIKDHNLSTMYYCYVLGANINQAMLSSIQYYNIENMFFCIDLGADVFEEGTTALGEGYELIKNILSLKIYSPATTPLPKSTDPEIIDHALKNYVSKNMMIFLTYDLRGSGATNFSLLKQAGDVEENPGPMQSLFNIALKALTLKNHVEFLKRDKEVLTRLGLCCKNYDLIHKCSECGNICPNGQQHGTCININYLLIYAVKRDNYMLAYRLLCWGANEKFAHYFRRPLPNLKPLLPKKELTPKDIKQLAYEHFHSDSELITVFEVFRKSRNINDCLEFFYKKNIEFEIYFARLYVYSKTFYRKSWYWFCIFMAVKHSMEHALKKITKTYIPTFYNKTTLPLVLFLSACFYENVEWMKNFFYKANKKIQQKMLSYGMEWAATHGKVRTFVCCYTLGGTASLKMYQKAYQNERYMIMALCSYLGNIQINNPWDSLNPYMMVQNKEKFLPLKFSEETQYFYIGSGATNFSLLKQAGDVEENPGPMDTAMQLKTSIGLITCRMNTQNNQIETILVQKRYSLAFSEFIHCHYSINANQGHLIKMFNNMTINERLLVKTLDFDRMWYHIWIETPVYELYHKKYQKFRKNWLLPDNGKKLISLINQAKGSGTLLWEIPKGKPKEDESDLTCAIREFEEETGITREYYQILPEFKKSMSYFDGKTEYKHIYFLAMLCKSLEEPNMNLSLQYENRIAEISKISWQNMEAVRFISKRQSLNLEPIIGPAFNFIKNYLRYKH

SEQ ID NO: 115 - protein, 1327 aa, African swine fever virus
MNSLQVLTKKVLIETKAFSNYHEDDIFILQQLGLWWENGPIGFCKQCKMVTGGSMSCSDVDSYELDRALVKAVKENQTDLIKLFVLWGADINFGIMCAKTKQTKDLCIQLGANPEFLDVGLYNMFVYLVKRKKVLLAIEIYYDNILILDSFNSNDFHLLIDFVYNRFILYLDEKEEEMTRNTLVLKFWYKFAIDFNLTKPIHYLSKKFPHLDLWRLQTAIYLGNIDEVHHAYFQENIRLGLNVMMFLACARPGNKLGIYYCFALGADLDRALERLISFNSINREINRKIRGEKRLCIEGSYLSNVYFCIGLGANPYTKKIQEIIKQKHSNIMILLFSKKKILSPHSVLQNKILDPSDVHKMISTYKNTESFYPFSSLAVKLIQQANIGSGATNFSLLKQAGDVEENPGPMNKIFLNITETINMVLIEFLTGFFYLYGKRLFSISKVMDMICLDYYTIIPAPLAMMLAARLKNYDLMKRLHEWEISIDYALLVVDDVPSIDYCLSLGARSPTRAQKRELLRDNTFNPVYKYLMNCSGFPTKREKNIPCDVQCERLQKNIIKELVFNCSVLLEMVLHTEREYAYALHCAAKHNQLPILMYCWQQSTDAESILLKTCCSDKNINCFNYCILYGGAQNLDAAMVEAAKHDARMLINYCVMLGGRSLNEAKETAAMFGHIECAQHCFKLQSYVVDTSNTDDTDGSGATNFSLLKQAGDVEENPGPMFPEREIENLFVKWIKKHIRNGNLTLFEEFFKTDPWIVNRCDKNGSSVFMWICIYGRIDFLKFLFEQESYPGEIINPHRRDKDGNSALHYLAEKKNHLILEGVLGYFGKNGTRICLPNFNGMTPVMKAAIRGRSLNMLSLIKFGADPTQKDYHRGFTAWDWAVFTGNMELVKSLNHDYQNLSTCISLFTSWMFSTGGLRKSPKLLLLAVNIMSMKNFLNRIQSSCVGSGATNFSLLKQAGDVEENPGPMAANIIATRAVPKMASKKEHQYCLLDSQEKRHGHYPFSFELKPYGQTGANIIGVQGSLTHVIKMTVFPFMIPFPLQKTHIDDFIGGRIYLFFKELDMQAVSDVNGMQYHFEFKVVPVSPNQVELLPVNNKYKFTYAIPVVQYLTPIFYDLSGPLDFPLDTLSVHVDILSNHIQLPIQNHNLTTGDRVFISGYKHLQTIELCKNNKIFIKNIPPLSSEKIKLYILKNRIRIPLYFKSLKTSKGSGATNFSLLKQAGDVEENPGPMAVYAKDLDNNKELNQKLINDQLKIIDTLLLAEKKNFLVYELPAPFDFSSGDPLASQRDIYYAIIKSLEERGFTVKICMKGDRALLFITWKKIQSI

SEQ ID NO: 116 - protein, 1460 aa, African swine fever virus; identical to SEQ ID NO: 53

SEQ ID NO: 117 - protein, 1340 aa, African swine fever virus; identical to SEQ ID NO: 54

SEQ ID NO: 118 - protein, 1381 aa, African swine fever virus
MEEVITIAQIVHRGTDILSLNNEEIEALVDEIYSTLKGSNDIKNIRLIDFLFTLKDFVNHVRAEQSKLPDLSMPIEAYIRQLLVDPDVVPIVSEKKKELRVRPSTRKEIFLINGTHLAVPAEAPIEIYGLKLRLKTFSPQCFMRMAEIGSFSPETLGYVASGANLTNFIRVFMKCVDQETWKKNGEGVVVTTKENIIQFTHQYIELYKFLRSGGHSWLINRLAEEMVHRKLDREDQGSHISNIVETEEIEPEENIKRVIFFLKELSTMYSVSPVFTSGYMPLLYDLYRAGYLEVLWNPVEQKFLQHAEQREKEQMILQQVDMKLTEVITQARQYFKIMEEKIGRVQSDAIREILTMEGKVDDPNSILQEVIKACGKQEAELITTEYLNIKKQWELQEKNACAHLKLVKQLRSGLQYAELLKVLESIRVLYKEKNNTTNWNLCKACGFKLLCPHVDMLIQLQAAEASYDTMRTKLMKFSGINKEKENNQGLIYSYFCKICGEELAHFIQEDRTADVGIIGDLNSKLRVFIWQETMKACTFIHFGKLVDVKQFANIAVNVCLPLVYSIENIKKEEDYDPLTQLYAVIYIYAYILNLIYSSQKNKEFLTITIHGMKADSSLNAYVTFLLEKMMQQYSGIINQLSEITDQWIANNFREAFKKIIHQNGLQGLSVQDDTKVLLTEILLDPMYDYAATVARIDGSIPMHKPRTPKEAEYEFKTVIGRTPAELLSQKEFYDKIYTSKYRPDFTQLTRLNDIYFQEESLRVWWGGRDEEKTSTLIYLRAYELFLKYLQNAPNFNSELAEFKTYENAYGEQKALLAQQGFYNIFDPNTGRADQRTRLFEYKRLPISTLYDERGLPHKWTIYVYKAVDSSQKPAEIEVTRKDVIKKIDNHYALADLRCSVCHVLQHEVGQLNIKKVQTALKASLEFNTFYAFYESRCPKGGLHDFQDKKCVKCGLFTYIIYDHLSQPELVHDYYNNYKDQYDKEKMSIRSIQIKKDMTTPSTETQPKPPQEPWTFDYGKIIKTAKILDISPAVIEAIGAMEGRSYADIREGQGAPPPPTSMDDPRLMAVDSAVRIFLYNYNCLRHVSTFNKPPIHVERLVKHLSYEEKEDLEKVLPNVVNEYHTTFKHLRVTDPASALLYSIEFLCISFLTLYEIKEPSWVVNIVREFALTELNTIIQSEKLLSKPGAFNFMIFGEDFVCSGEDSSMDDISAYSSPGLFGEDIIDRLDDPFSIEDVDISLDVLDNLAPQMHSNVSFNFIACVLFPTPLIPSMAMSIPRMINKRKKRIQFLTFLTNLFLYNIVQHCISGIMETQKLISMVKEALEKYQYPLTAKNIKVVIQKEHNVVLPTGSINSILYSNSELFEKIDKTNTIYPPLWIRKN

SEQ ID NO: 119 - protein, 1402 aa, African swine fever virus
MEPLRPQITYGPIETVDNEELTEADMLSFISAAVNSTGLIGYNIKSFDDLMDNGIPQIVKQMFNVDITYKDQRDHTEIDKLRESVQIQFNFTDVNIERPQHRNYSQGNKINLLPNKARLCGLSYSGPVNLAAEVILTAHYSNGRQEVKRASIPPFQVSTFPIMRGSNRCHTHHLSKTAKKEIGEDPNEPGGYFIARGGEWVVDLLENIRFNTLHIHYHTMQQGNNEIIRGEFISQPGGAFENSSQIIIRYMTTGAITIEINSTKFSKLRIPWYLIFRMFGMTGDDSIIEQVVFDLESNSLVNTFMIEILEKSIHVLDPIFQPVQHELNREKIIQFLSEKVSKFVSNPSAYKSDENAVQYLNERQLTILDKILLPHMGQTADTRVRKLRFLGLLIHKILLVIMNVFPPTDRDSYRTKRVHGSGVSLAKAFKAIFNTSVIAPIINGFKELLKQTAFEELTQRNIIEAFSAALSKNTASDLNRSMEQSIISGNKTIMVRQRPIVNRVSTQSLERKNLLNTISALRTVNTHNTTNASKQTERADMMRRVHASYPGYICVAQSADTGEKVGMSKQLAITANVCTAGEVLSLKQRLLSDPAIQQLADVSNKDIVRKGLARVFINGEWIGCCTNAFELAQRYRMLRREGKVVHPHTTIYWDSMVDEVEFWLDVGRLTRPLLIVDNNIEKYNQACYKAAEARKKGDKDWEKHKIPFIQNTRFTPQMAKDILAGTLTLEDLVAQGICEFITPEEAENCLVAFSIIELRKHKHDVTRRFTHVDVPQAILGLAALVSPYANCTQPARVTYETNQGRQTGGWYCFSWPYRVDMNRFFQFYNEMPLVKTIAHNYVIPNGLNTIVAYMIYGGYNQEDSVIVSQSFIDRGGFAGTFYREEKVELESDIESFGKPDPLITKNLKPGANYEKLVDGFVPVGTVVKKGDIIIGKVAKIRGEKDELNKYIDRSVMYGFDEPAVVDAVMRPHGPNDEIFGLMRLRYERNLNIGDKMSSRSGNKGIAALALPTSDMPFTEDGLQPDLIVNPHSHPSRMTNGQMIETTVGLANALQGVVTDGTAFLPINVQLLSERLAQEGLRFNGCQKMFNGQTGEYFDAAIFIGPTYHQRLQKFVLDDRYAVASYGPTDALTGQPLDGKRSHGGLRLGEMEHWVLTAQGAMQTIIEKSHDDSDGCISYICRNCGEPAIYNASHPIYKCMNCDVQADIGMVDSRRSSIVFQHEMRAANVNITSVLSPRVFQPAMGTFSVTASAKNDNAVCKYLKEPMVENKNYKNILRNEHDKKNLNDALRQHITVHNPVVDWCNNYSTFSSQDFEEYKIYIHSDLMDGRPSPKKTWCVILMNWGSISSGTPGLFVESIRNTPSVVKINVIFLKVISNTAVSVFWRDRRIRFESDWLNSYFQK

SEQ ID NO: 120 - protein, 1389 aa, African swine fever virus
MISIMDRSEIVARENPVITQRVTNLLQTNAPLLFMPIDIHEVRYGAYTLFMYGSLENGYKAEVRIENIPVFFDVQIEFNDTNQLFLKSLLTAENIVYERLETLTQRPVMGYREKEKEFAPYIRIFFKSLYERRKAITYLNNMGYNTAADDTTCYYRMVSRELKLPLTSWIQLQHYSYEPRGLVHRFSVTPEDLVSYQNDGPTDHSIVMAYDIETYSPVKGTVPDPNQANDVVFMICMRIFWIHSTEPLASTCITMAPCKKSSEWTTILCSSEKNLLLSFAEQFSRWAPDICTGFNDSRYDWPFIVEKSMQHGILEEIFNKMSLFWHQKLDTILKCYYVKEKRVKISAEKSIISSFLHTPGCLPIDVRNMCMQLYPKAEKTSLKAFLENCGLDSKVDLPYHLMWKYYETRDSEKIADVAYYCIIDAQRCQDLLVRHNVIPDRREVGILSYTSLYDCIYYAGGHKVCNMLIAYAIHDEYGRIACSTIARGKREHGKYPGAFVIDPVKGLEQDKPTTGLDFASLYPSLIMAYNFSPEKFVASRDEANSLMAKGESLHYVSFHFNNRLVEGWFVRHNNVPDKMGLYPKVLIDLLNKRTALKQELKKLGEKKECIHESHPGFKELQFRHAMVDAKQKALKIFMNTFYGEAGNNLSPFFLLPLAGGVTSSGQYNLKLVYNFVINKGYGIKYGDTDSLYITCPDSLYTEVTDAYLNSQKTIKHYEQLCHEKVLLSMKAMSTLCAEVNEYLRQDNGTSYLRMAYEEVLFPVCFTGKKKYYGIAHVNTPNFNTKELFIRGIDIIKQGQTKLTKTIGTRIMEESMKLRRPEDHRPPLIEIVKTVLKDAVVNMKQWNFEDFIQTDAWRPDKDNKAVQIFMSRMHARREQLKKHGAAASQFAEPEPGERFSYVIVEKQVQFDIQGHRTDSSRKGDKMEYVSEAKAKNLPIDILFYINNYVLGLCARFINENEEFQPPDNVSNKDEYAQRRAKSYLQKFVQSIHPKDKSVIKQGNVHRQCYKYIHQEIKKKIGIFADLYKEFFNNTTNPIESFIQSTQFMIQYFDGEQKVNHSMKKMVEQHATASNRAGKPAGNPAGNALMRAIFTQLITEEKKIVQALYNKGDAIHDLLTYIINNINYKIATFQTKQMLTFEFSSTHVELLLKLNKTWLILAGIHVAKKHLQAFLDSYNNESPSRTFIQQAIEEECGSIKPSCYDFISMGNHPIKQDMKTCDYYHGEKKLKYMRRMLYNEPLGTYAVSSLFGCDMIVLTWNCTISGRTLHRRIHTRFGQYYHNNCYYTKIDDIIGDYPDTFYRPLYRYKPMDTSLKNNDGALEADNKNYQDYRAEPDKTNDVLDVTKYNSMVDCCHKNYSTFTSEWYINERKYNDVPEGPKKAVVHRCTIL

SEQ ID NO: 121 - protein, 1394 aa, African swine fever virus
MEAFEISDFKEHAKKKSMWAGALNKVTISGLMGVFTEDEDLMALPIHRDHCPALLKIFDEIIVNATDHERACHNKTKKVTYIKISFDKGVFSCENDGPGIPIAKHEQASLIAKRDVYVPEVASCHFLAGTNINKAKDCIKGGTNGVGLKLAMVHSQWAILTTADGAQKYVQHINQRLDIIEPPTITPSREMFTRIELMPVYQELGYAEPLSETEQADLSAWIYLRACQCAAYVGKGTTIYYNDKPCRTGSVMALAKMYTLLSAPNSTIHTATIKADAKPYSLHPLQVAAVVSPKFKKFEHVSVINGVNCVKGEHVTFLKKTINEMVVKKFQQTIKDKNRKTTLRDSCSNIFIVIVGSIPGIEWTGQRKDELSIAENVFKTHYSIPSSFLTSMTKSIVDILLQSISKKDNHKQVDVDKYTRARNAGGKRAQDCMLLAAEGDSALSLLRTGLTLGKSNPSGPSFDFCGMISLGGVIMNACKKVTNITTDSGETIMVRNEQLTNNKVLQGIVQVLGLDFNCHYKTQEERAKLRYGCIVACVDQDLDGCGKILGLLLAYFHLFWPQLIIHGFVKRLLTPLIRVYEKGKTMPVEFYYEQEFDAWAKKQTSLANHTVKYYKGLAAHDTHEVKSMFKHFDNMVYTFTLDDSAKELFHIYFGGESELRKRELCTGVVPLTETQTQSIHSVRRIPCSLHLQVDTKAYKLDAIERQIPNFLDGMTRARRKILAGGVKCFASNNRERKVFQFGGYVADHMFYHHGDMSLNTSIIKAAQYYPGSSHLYPVFIGIGSFGSRHLGGKDAGSPRYISVQLASEFIKTMFPAEDSWLLPYVFEDGQRAEPEYYVPVLPLAIMEYGANPSEGWKYTTWARQLEDILALVRAYVDKDNPKHELLHYAIKHKITILPLRPSNYNFKGHLKRFGQYYYSYGTYVISEQRNIITITELPLRVPTVAYIESIKKSSNRMTFIEEIIDYSSSETIEILVKLKPNSLNRIVEEFKETEEQDSIENFLRLRNCLHSHLNFVKPKGGIIEFNTYYEILYAWLPYRRELYQKRLMREHAVLKLRIIMETAIVRYINESAELNLSHYEDEKEASRILSEHGFPPLNHTLIISPEFASIEELNQKALQGCYTYILSLQARELLIAAKTRRVEKIKKMQARLDKVEQLLQESPFPGASVWLEEIDAVEKAIIKGRNTQWKFHMYSILIACLVLLLCLVIYVGHRADHARKYLEGMWHGDPVFLKQSGLQSFYLYIQPDHTCFFSIVNKNGEKLMETKIPCTITNKIYMFFKPIFEFHVVMEDIHSYFPKQFNFLLDSTEGKLILENNHVIYAVLYKDNFATALGKTVEKYITQNMHISIITRYTLKYIYMHLTHNHILFTYIMRIYLIKHNHMLFTTHVYTYIM

SEQ ID NO: 122 - protein, 1403 aa, African swine fever virus
MAYPELDAADFLQQLARRKEFKSLISPPVDQKELIRDLRAHFVQIGGPGCEKGGRAFFPCDPYASPFPSIKGLQLHNAQLFVQNFQNPNTPYSRLLLNWQTGTGKSIAAIAIARQFMNHYMNFIENAPWIFVVGFTRAIIQTEMLRRPELGFVSYKEVAELHRLLHIAKQSGSTTSVESRHLNGFVSTLKRRLTDRNRGGFFQFYGYKEFASKLFNITSKGEEKNFDVLSLFHRSDEAEDTLNENDISQFVQKISEAETNGLIRVNQKIMEQLRGGLLIADEIHNVYNIQERNNYGIALQYVLDAFPPHQAPRAVFMSATPVTGSVMEYVDLLNLLVPRHELPNGQPLQRQQLFDSSGHSVKWKKDALALVERLSTGRVSFLLDTNTNFYPERIFAGKMLSYKDETLPYLHFIECPMSEYQLETLKQLGPDPKISSNAYSIYDMVFPNPKFSKQTEPKAYGLFNSTETPTALSMASTDWLLENGVQIIEPSRRAPFNVSGSFLSLQPPTHISGLAFYSGKYTQMMKDILSIIRQGRGKILIYHNRVRMSGVLILQEILQSNGILNEVSSPVGTTRCSICAAIRDEHTHSDHQFIPVRFTILHSEIEPAVRERSLALFNASSNLEGHQLRILIGSKVIVEGLNFQAVRYEMIMSLPLDIPRLIQVFGRVVRKNSHMELPPSERNVTIYLYVSTTPDGGPELAKYAQKLKEYILIQEGDKALRKHAIDGFTNQIKIDKPMLESLPLSPSITPANVGATVLNTFEAYGYGEQEVKTISNIIISLFMARPVWTYSELWKAVSTPKLIQGITIDNKLFSEDNFALALISLCYSKNQCKELWIQNRLCTIMHVPAKPEHLYVAAVLNHKKEPVLDIETYIRDFQPPAMHSIRITKYLEHSQTKEPFQVLYEKFQKDFQDEPMEQVLIHYPASFHYTMLEALIIDNLAGMGALVEVYKKFFIAFSKKDIQPFPDIFKIISHVPGDDNTLVGYATEDSVRLITSREDKTWHEIPLYMLNINVKRKENDIVIGYMESKGKALKFKIRPPIQVLKKNEITDIRMLNRGAVCETRGREEQQKIADQLGISLNLTKISAIKLCLLIRNNLLQKEMEARNQPNGMQDGIRWFYLFNDKMPSLVHTSMATNFFIQPITEEAEAYYPPSVITNKRKDLGVDVYCCSDLVLQPGLNIVRLHIKVACEHMGKKCGFKIMARSSMCTHERLLILANGIGLIDPGYVGELMLKIINLGDTPVQIWAKECLVQLVAQGDHVPDHINILKRNQIFPLFAPTPRGEGRFGSTGEAGIMRTMKICKACSSCMVRTYVDGNIIFRCSCGESVQGDSQNLLVSSKVYHTGEMEDKYKIFIKNAPFDPTNCQIKKDCPNCHLDYLTQICIGSQKIIILVCRCGYMSNRG

SEQ ID NO: 123 - protein, 1297 aa, African swine fever virus
MQETFKFLRCNSQGEAVEDKYSLETLKNHFVVRDEYNNLFRVFSSRDDFWEWEAAQPFEQKCFHEVVFGFLPQRLKFDIDFPVNKSYSDDNVDDNDNVEDNVYDILDMIINVIMDVFYETYSLPYNINLTREQILLTDSIGLNKKRELKYSFHIILYTYSVLNNNEAKVFTSKVLENLPKHVYPFVDPQVNKSIQNFRIIGSHKKGSMRVKMFNEELAEVFETSTTTKKSDTLIATPFETTCLPCIFTNVKETTPSSCDTIQQSELEEVLKFAGTLCKNHCFLRVHKNLVLFKRTSPSYCEICKRMHDKDNTLILRVTGNKVYQHCRHDNKHSLLMGSLSGTNNFVETYVDQVMTKSIEVHESILFEELPDTQKHIYDESSMREYERVPTLVVKAQMKIGKTVQLRNYLQKYYGNNSISKQQTIRFVTFRQIFSKNIQSRLPNFTLYSEVTGDLDSYERVIIQVESLFRLTSTAEPVDLLILDEVESIFNQFNSGLHKYFAPSFAIFMWMLETANYVICLDANLGNRTYNILQRFRGDVPIFFHWNQYKRAQHDTYYFTSSRETWLNNLLKDLLEDKKIVIPTNSLMEARLLQSFIQKKFPEKKIGFYSSKSTAHERESHFNNVSYYWGLVDILIYTPTISAGVSYEDKRFDVLYGFFNNMSCDVETCCQMLGRVRELKSKCYKICLQGKQNYYPETIEDIEMFTLQKRDTLFQTISNHQLSFTYSKETGRPIYYKTPYYHLWLETMRIQHLSKNHFITRFINQIADTGAKVFILTGEKLETVKQYTSIKMEIKHQDYVNIASAETIDANKALQIKQNLKEGITVDQQDLFAYEKYKLLEFYAWHGHKITPKFVEQYNSFMTKQNYTGRVQISRGKTVYESLTMLQTQELNFHQWAMQHAEHHDLQFNYSFQSHMYAIMLLTKCGFKCVQDPNILTNEQLMTKLVDEFVQYDLSAISFEFKLKKPNKTDPQTILKFINKVLGLRYGLKIHHNKGNYYIKNTKAGSLIPFVRQQIKQSPCVVSNLLPITETSSAKEETSPIKEETFTETMGGTTDFVLSITIVLVILIIIAFIWYNFTGWSPFKYSKGNTVTFKTPDESSIAYMRFRNCVFTFTDPKGSLHSIDVTEVLNNMAKGFRDAQNPPSSFTLGGHCQAPLNAFSFVLPGVNDRATVATADEAKKWENCDATLTGLQRIIMGNRLIKKDLKKCEYYYGEQQNLKQIWRLLFNEPLGTYVVSSFLKKNYVVISFSCPTNTRIMHLRINICYDLYCINGEYYEKIDDFIRLYPHIFYRPLYRYKS

SEQ ID NO: 124 - protein, 1366 aa, African swine fever virus
MGKPTLLEPGHLYNVPAEHKNDVPIHYIITWIKQRLPEFGGAIPTSLADRVLIIKSRTGSGKSTALPVHVFRILRNENTHSFQKYLGRSVICTQPRVLTAVTLAKDIGASTHYPDMILGQTVGYQTKPLTEKPNRGLIYATAGVLLAQLHTMTDDEIASRYAFMIIDEAHERALGIDLMLMYIKSMLQRMLQRGSIGALRIPFVILTSATIDTHKYSTYFGIGKENIILVEGRQYGVETHWPLYNTNNYIKTACETALTIHKENIHDRPTEADILIFMPGMAEIRFLSMLLNNANMDLAKEKLPLMLILPIDSEAIAQENEAYLGLKAEIKNLWVKNPLTAKVEKPLRRVIVSTVVAETGLTIETLKYVIDPGWNRSIETYYPEWAGGLITRPAAQSRIEQRKGRVGRVFPGHFYPLYTKHVFEQIPVQQYPEIITEGPGAIFLSIVVETIKKNKEGVFKAEEIDMLDPPPTDALASAIERAIVAGLLTRGEKGLQLTQLGDIASRFSFLSIEEARMCFSGYFWQAAISDIATILAVVSVADKKLTNLLDSKQRNGAMLAEAVLAGIPPFLQNIDNAYTNIHLLLADDLLEGLFIFEGFQHAIVYFINNKVNNVAKHLREWCEKKMLKYSSMVQILARREDILNELAIVGLNPFHQWQNRLASANAETFLKRVCTLKQCMYEAYRLNCFCYDEHRLLYTGRNGIHFSYHDAVIKNPSCIVTPRIMLSPVSKQYMEWRLEPSFVSVLDGFVNVDINFLLPRQEIPNILGGVENEEEEPPLPIQVFLHKYVKTHFHFSGKSFKELKMKPSQMIKFPETTLINMIPDIPKNVVQTYLEINVCHRYSFKRLIYCETFYTDMDDVQHENSVELIGLPMAAHHLTINDFNKLYHLLKPDGFLIMYDLHQGQEAFWLHSLQDALGHHTIRRDMDFHTIPEWETIFKECGFTPIFSKQPSEHELFIVFKKMILIASPFSLAHLEYLHTWHVTIKNIAQQHGLDIKVAIVVSTSHLNNFLPISGALNIECITFPSCGIKEIDLLWARIKLFQHYCAIGARLLWLVSADIRPPVSAWPAIADSLKKGADAVVIPYPSRWNNLIPTVIKEIVVHQKKCLVAVDARHLDTDTQIVGAGMGCIVLTLKALMVRLSIGKQPVKILWPDLHGTAEGIPLEGVEVGWFLNAYAHKLNIRCLGADHIAQHLTMVVYDLLVSLSKESIDVLRFVEANLAAFNQQYIFFNIQRKNSITTPLLITPQQEKISQIVEFLMDEYNKNNRRPSGPPREQPMHPLLPYQQSSDEQPMMPYQQPPGNDDQPYEQIYHKKHASQQVNTELNDYYQHILALGDEDKGMDSMLKLPEKAKRDSDDEDDMFSIKN

SEQ ID NO: 125 - protein, 1389 aa, African swine fever virus
MREESWEDHDTIQLTAQRKYLAEVQALETLLTRELSVFLTEPGSKKTNIINRITGKTYALPSTELLRLYEHLEQCRKQGALMYFLERQGTYSGLMLDYDLKLNTNAVPPLEPPALSRLCHRIFVHIKNSSVLPEGSHKIHFFFTLKPEVVQGKYGFHVLIPGLKLAASTKKSIIGSLQHDATVQKILHEQGVTNPESCLDPHSASVPSLLYGSSKLNHKPYQLKTGFELVFDSSDPDYIPIHQIKNLESYNLVSELSLTNEQGSLVRPVYCAADIAAEKEEEIPTEDHSLSILMLHDPEARYLHKILNLLPPEYYVEYPLWSNVVFALANTSANYRPLAEWFSQKCPEKWNTGGKEKLEKLWNDASHHTEKKITKRSIMYWAHKHAPQQYKEIVEQGYFSILAEYVYSYNGMLEHYMIAKVIYAMMGNKFVVDVDSNGKYVWFEFVLPGQPMNQGEIWKWRKEVNPDELHIYISENFSRVMDRITEHIKYHLSQPHESNILNYYKKLLKAFERSKSKIFNDSFKKGVIRQAEFLFRQRSFIQTLDTNPHLLGVGNGVLSIETIPAKLINHFHEHPIHQYTHICYVPFNPENPWTKLLLNALQDIIPELDARLWIMFYLSTAIFRGLKEALMLLWLGGGCNGKTFLMRLVAMVLGDHYASKLNISLLTSCRETAEKPNSAFMRLKGRGYGYFEETNKSEVLNTSRLKEMVNPGDVTARELNQKQESFQMTATMVAASNYNFIIDTTDHGTWRRLRHYRSKVKFCHNPDPSNPYEKKEDPRFIHEYIMDPDCQNAFFSILVYFWEKLQKEYNGQIKKVFCPTIESETEAYRKSQDTLHRFITERVVESPSAETVYNLSEVVTAYAEWYNTNINVKRHIALELSQELENSVLEKYLQWSPNKTRILKGCRILHKFETLQPGESYIGVSTAGTLLNTPICEPKNKWWEWSPNPSAPPEKEASAPTPMSSSLQELCRKKLPDCILPEFFDDYVLQLLGLHWQDHGSLQRIEKNQILVQQEPIHINEALKVAASEGNYEIVELLLSWEADPRYAVVGALESKYYDLVYKYYDQVKDCHDILPLIQNPETFERCHELNSTCSLKCLFKHAVINDMLPILQKYTDYLDRWEYCSQMLFELACSKKKYEMVVWIEGVLGVGKVTSLFTIAISNRDLQLYSLGYSIILENLYSCGQDPKFLLNHFLRDVSIKGLLPFVIKTIEYGGSKEIAITLAKKYQHKHILKYFETWESMADNDNEDLIMDDLVEEYVETEEENLVDSEEESEDKDEIVESPSICEGFVQASSQTLVIIPDNERITSNVLTTFEATRLVAVRAQQLAINGSTMLKKKYSSPIDIAKQELFNRKIPLLVMRCIKVTPEGQKIVEIWNPREMGIPLLD

SEQ ID NO: 126 - protein, 1340 aa, African swine fever virus
MCAGFYVAVHPWLEAQSLHKVGHTGNLAARLHDGSYTTCFTDEWKYCFTLETSTKKDAQKIEAGVLYCAQFFRVKNKELVCLLPEKIKQLAEDVANCLDISYTLCDSPAYEMNDSTIVVEPSLPSDPLISKEKLRHLVITPVEDEHFADDVLFFSTDETRTAIEDRLYQKEAANMGYQELRRSGRAILQMACRCGKTRVAYLILSNYLQGKVLYLVPGLSLLRQTLEKLYQYGISLKNVLLVGSDQTRIVLNHDNIEMTTNPVFIAKRIREAPSLLVIATYQSSTLLVDDFDLIISDECHRICGEWETRPFTHVLLNFKKGHRLFLTATPRYDTPLSMKNRELFGGVAFRYYLREGIEAGYVNDFELQMVAAPKLAHQPSTKEETTKQIIVKQIIMALAYLKTNIPAPKMLVFTRDIKQAKELYAALVDQGVYALIAHSTLPRQVILKTFTEFCSSKEPVILLNCRLFQEGVEVPELNAVFFAAPRHSPRDIIQSICRPLNKQVQKPHATIFLPLEVNTENVCLDRFSSIIPFADALASEDPRFYEHLLNPSEVAYPINWIGAHGSVSELLQLARHAIRYGTQGKIDRLTRSERLPWKAAFAELKRTVEICCRYPKINDGFHFGGATLRFDTWYKWVIKSYLQYKNKEPSSLEPYQVSDLESLQDWTTRGVGGPYPWEESMAFLETWLAQNKGELVAIDIHQGGWIGLDATPMERLSGVLTTVSQRDGRSYGKNKKLRPKKGFMIPPQQAQDLDRIFGKHNLKWRKDRVNGFLKEDEHGNYTGEPTCIQEAYRTFKEYVKTNPEYIEKYWPGYAKGKHKHQELPHIWEKGLAPPRYKAFKDGNKQLIQRSPKKKDIKNMLHLIYISIIVVLIIILISYTRKPKYFRITAPRSVALFHGIHPLNPKNYKTFSEEFETILNNAIEDGDFKGQLTEPCSYALRGGKYIRPIILMEIVRACQLQHSFGAPIYPAEAALAAEYFHVASLIIDDMPSFDNDVKRRNKDTVWARFGVAKAQMSALALTMQGFQNICRQIDWIKEHCPRFPDPNQLGALLCTFVSHSLNSAGSGQLVDTPEKTIPFFKIAFIMGWVLGTGSVEDIGMIERAAHCFGHAFQLADDIKDHDTDTGWNYAKIHGKQKTFDDVAQSLQECKKILHGKKIFTSIWNEIFQKVINVALGTMNVDFIAGINNLGEKIYTCEPFKTSFQNPFIVALIITAVVLVVFFAICNPPVDKKRKTKTAIYVYICIVALLFLHYYVLNHQLNDIYNKSNMDVIVSSIHDKYKGGDEIIPPISPPSVSNELEEDQPKKIPAGPKPADSKPVSLPDSKPLVPLQEVIMPSQYNN

SEQ ID NO: 127 - protein, 1393 aa, African swine fever virus
MTKLAQWMFEQYVKDLNLKNRGSPSFRKWLTLQPSLLRYSGVMRANAFDILKYGYPMQQSGYTVATLEIHFKNIRSSFANIYWNRDSEEPEYVCCCATYQSHDGEYRYRFVWYQPFIEAYNAIEAALDPLETIILNLIAARDLDFVVHIFPYNKGHEDYLASTQLILKIFIATLLMDILRIKDNTLDVHLNSDYIIVMERLWPHIKDAIEHFFEAHKDLLGYLIAFRNGGNFAGSLRPSCGQKIVPLTIREVLQMNDINLAVWREVFIMQECSDLVINGIAPCFPIFNTWTYLQGINQIFFENTSLQEKFKKDFIARELSKEIIKGQKTLNDKEFKKLSLHQIQYMESFLLMSDVAIMITTEYVGYTLQSLPGIISRSSYLSPIVKNILMDEDSFMSLLFDLCYGAYVLHKKENVIHADLHLNNMTYYHFNPTSFTDRNKPGKYTLKVKNPVIAFITGPKVETETYVFKHIDGFGCIIDFSRAIMGPNHAIKLERQYGLAFVNTFYRNQSEHILKVLRYYFPEMLTNRENEIQGVILSNFNFFFNSITAIDFYAIARNLRSMLSLDYLHTSEVKRNVEISQTFLDTCQFLEEKAVEFLFKNLHTVLSGKPVEKTAGDVLLPIVFKKFLYPNIPKNILRSFTVIDVYNYNNIKRYSGKAIQTFPPWAQTKEILTHAEGRTFEDIFPRGELVFKKAYAENNHLDKILQRIREQLANENLMEKIFQNVEIKPFLIDFSNLFIKNAAKKLFQLEEQLPLVPVNVVMDFKGISRAAVHGLSRVLQDEIPNYMLDIKPGGYKIEDSTDLFMTEQFIRNRINFIPIYAKNETLVFALRSLNNSCEVKTIYSRDLIQVAGPKLKYPIFNPTFEIGFLQPGKSLIIEDIYIKKGIGRKHAAFNLAVKTHFSHLDIEQYPTDKKEYMALSGYKQSSMTSDPRHHRLGLCFPAVPLPHINQAVRTYLKNACRIIIGRIQSIQKIYENFEEPQPELVLFSMDEEKTKAIITIKDETHTIGNLLKTYIYEMIPDISFVGYQCVPHKQEMVLTIIHKASQEDLITLLEKSIQNIIQTFQILEKNVDELIAMVETQMDKLGFLLNHIGKQVTTKVLSNAHITQTMKEIILENHSVDGGAAKNVSKGKSSPKEKKHWTEFESWEQLSKSKRSFKEYWAERNEIVNTLLLNWDNVRGAIKKFLDDDREWCGRINMINGVPEIVEIIPSPYRAGENIYFGSEAMMPADIYSRVANKPAMFVFHTHPNLGSCCGGMPSICDISTTLRYLLMGWTAGHLIISSNQVGMLTVDKRIIVDLWANENPRWLMAQKILDIFMMLTSRRSLVNPWTLRDLKKILQDYGIEYIIFPSNDFFIYEDERLLMFSKKWTNFFTLHELLDDLETIETKASSTT

SEQ ID NO: 128 - protein, 1374 aa, African swine fever virus
MFSLQELCRKNIYILPYPLAKHVLQQLGLYWKGHGSLQRIGDDHVLLQQDLIFSINEALRMAGEEGNNEVVKLLLLWEGNLHYAIIGALEGDRYDLIHKYYDQIGDCHKILPLIQDPQIFEKCHELSNSCNIRCLLEHAVKHDMLSILQKHKEQIRLHMALTQILFELACHERKNDIIRWIGYSLHIHHLETIFDVAFAHKNLSLYVLGYELLMHKVNTEAAYIELPNLLSYHLRTAAAGGLLNFMLETIKHGGYLDKTVLSAAIRYKHRKIVAHFIHQVPRKTVKKLLLYAVQARAPKKTLNLLLSSLNYSVHTITKQLVHNVVIYSSTLIVKLLLMRRKNKLNLVDAVLARLVKYSTYTDIVQFMGEFSVSPERVIKMAARESRTFLIEMISKAAWGNHPQTLIHHLKQLTNTMKPQSGKDHIIYTIHYIYLNSNMLVAEEEKNIFKLAKFYANHNAVNRFKQICEDYYILDARFKTLILECFEIAVQKNYPRIANIVDDYIRFLFYRGNITEEEIREAYSLKDAEVYVDLKWLQQGEMVMDQEESHVISIFETLGAYFINIFYNFLYKNALYKKHSIVTEYQYQVKGYILGVKQNKKLYEKMLDSFYKYFCNITQINSKTLNFSNFVTTIVDSFIPKEYSQSISLEKKESILELLLCDYISNLGTFITTEKMLPFIIKNRKENYHKVTKEMQDYSLTFLLKKRMELYNKFLRKQAYVEPETELEETYARLSSYNRSLLHQIEELTSENKSLLADLSTLRKKYEKRQSEYRRLVQLLYQQIQRSSTSKSSYPLTKFIETLPSEHFSNEEYQKETPADQKEVVEMELLRKQELLTSQELTSKSPNNYPVPHSRTIVSKPLDNYPVPRSRTTTKIDFDNSLQNQELHTKNGFSEKDIVEFGQDKPEEENILAIDQDKPEEETILAIKQDISEEDNIFAIDQDKPEFNQDTPEFKEAVLDIKENILEEENQDEPIVQNPFLENFWKPEQKTFNQSGLFEESSNFSNDWSGGDVTLNFSMLSLQTLAKKVVACNYLSSDYDYTLQRFGLWWDLGPIHLCNNCKQVFSYKHLQCFSEDDLCLEAALVKAVKSDNLELIRLFVDWGANPEYGLIRVPAVYLKRLCAELGGLTPVSEPRLLEILKEVARLKSCAGVLLGYDMFCHNPLLETVTRTTLDTVTYTCSNIPLTGDTAHHLLTKFWFALALRHNFTKAIHYFYKRHKNHLYWRVACSLYFNNIFDIHELCREKEICISPNLMMKFACLREKNYAAIYYCHRLGASLDYGMNLSIYNNNTLNMFFCIDLGAADFDRAQLIAHKAYMYNLSNIFLVKQLFSRDVTLVLDVTEPQEIYDMLKTYTSKNLKRAEEYLTAHPEIIVID

SEQ ID NO: 129 - protein, 1402 aa, African swine fever virus
MFSLQDLCRKHLFILPDVFGEHVLQRLGLYWRCHGSLQRIGDDHILIRRDLILSTNEALRMAGEEGNNEVVKLLLLWKGNLHYAVIGALQGDQYDLIHKYENQIGDFHFILPLIQDANTFEKCHALERFCGVSCLLKHATKYNMLPILQKYQEELSMRAYLHETLFELACLWQRYDVLKWIEQTIHVYDLKIMFNIAISKRDLTMYSLGYIFLFDRGNTEATLLTQHLKKTAAKGLLHFVLETLKYGGNIDTVLTQAVKYNHRKLLDYFLRQLPRKHIEKLLLLAVQEKASKKTLNLLLSHLNYSVKRIKKLPRYVIEYESTLVIKILLKKRVNLIDAMLEKMVRYFSATKVRTIMDELSISPERVIKMAIQKMRTDIVIHTSYVWEDDLERLTRLKNMVYTIKYEHGKKMLIKVMHGIYKNLLYGEREKVMFYLAKLYVAQNAATQFRDICKDCYKLDVARFKPRFKQLILDCLEIITKKSCYSILEILEKHIISLFTMKVMTEEEKNLCLEILYKVIHYKTIQCMEDTTFLEGANLAGITTLMNNLHINEQANLEELEKQVMGKQQSFPTDHFDEELNGLAKSLGINFNDPEFSLDSPHSIISKKPSGRGGDKVHGGIRRDSVCTDSICSDSVCSGSIRSGSIRSGSIRNGSIRSGSVRDGSIRNGSVRSGKTRRGLACNSSSRNDRGYSLSTHRKKYAESEASQKTAISKRDRKNHYAESEYSEKSIKPSTKQVDRLINHLRSNGDPNSFYKKDHDYERKTKLVKLEKINMLLTYLGNEQISTDDIKIPTIDSSMQEIDDVIEMLTLRNVGIRYSSIAEEILIGLARGLEIVFDGTREIPFLNYRPDYTGLHNTFMIKLFKMRYETSQVVGNLVQNMSPLSKICLELGPSLLLYPALIRTKHKASEDLYNLLQKGPEDPFTAYNEIHETLKKNNKMSLPLSLQTLVKKTIASQCLSIDEHCILKYCGLWWHDAPLKLCMDRGRIQIKSGFLGEDIDLRVALIIAVKENNYSLIKLFTEWGANINYGLLSINTKHIRELCRQLGAKETLEDNDIFRIFTRIMHNKTSGSIILCHEIFMNNPILENKFVIQLRGLIYKRLWGLIEIKETDELNGLLVKYWYAKAVQYDCKDAICFLDEKYTDLNEWRLKCLLYYNKIYELHEMYHKENIQIDVHDMICLASTKDNNPLTIYYCYALGGNINQAMLTSVQYYNIGNIFFCIDLGGNAFEEGRAIAEQKGYNFLSHSLALDIYSSDASLPLNLKDPEEISSLLKDYKSKNLSIIWEYSHNILMSFSECPLVISACKKFLQKRITIENEALINALITALAQTSTLNDLCLLPIQTYLLSYKNAFEWIHFVCIAITTILDNKYNWKDCTVDINYIFLHVTYIYNIKTKEYLDYCS

SEQ ID NO: 130 - protein, 1362 aa, African swine fever virus
MYTHVDVVGIAEASAALYVQKDRDRYLDVLTTIENFIYQHKCIITGESAHLLFLKKNIYLYEFYSNNVAEHSKALATLLYKLDPEYLTRYTVLITKIPNHWYVINVDQREFVRLYAIPAVKQHLPIPILPFYCTSALTQQELFCLGPELQLIQIYSKLCNPNFVEEWPTLLDYEKSMRMLFLEQFPQRLEMTGGKKEEKEKHESIIKKIILEMVSTRQRIVVGGYIQKNLYNHVLKNRNRLQLITSLNIYEEKDIIQQFCDSNGLKIKIRINNPLLPTNPELRRLTIYFNHNNDDDQSYLIVDMYNTGSYELVPTNQINTLDGSFLIGTPFVQARFLLVEIWVLMLIAQQTKKDTKKIIQFFINQYEMLMNSPWPSMEALFPSSSKRYLGNYVDPNALIKWAQLKLKRIPPFYPGKPDEESCMSNYYYYYGGGRYDWLKTVEPTNFLKIGLPYQAHPLHLQHQATTPPSILEKFKRADILLNEVKAEMDPLMLQPETEKKLFQILSSIDMFKGLRKKVEFTYNAQIVTNAWLKMYELLNTMNFNNTSQAFCNCELPGGFISAINHFNYTMMHYPTFNWVASSLYPSSETDALEDHYGLYQCNPDNWLMQSPLLKKNIDYNNGDVTIASNVKNLALRATQRLTPIHLYTADGGINVGHDYNKQEELNLKLHFGQALTGLLSLSKGGNMILKHYTLNHAFTLSLICVFSHFFEELYITKPTSSRPTNSETYIVGKNRLRLFTPKEEQVLLKRLEFFNDTPLVDLSLYQNLLESVYFAVETIHLKQQIEFLNFGMKCYRHFYNKIKLLNDYLAPKKKIFQDRWRVLNKLYVLEKKHKLKLCASMIDQKIFETTLNIDDPTNFCTNVEAHLLKELENIYVGKCFKNSFILNITGVIQRSPCFIMRTNNSGRGYMHVRFSAVVSYLNAFDLIAAVKIIKNDSNIILGESLLTEPVTIVIPSSESQNNVAEVGQIVPVQLANSSVYYIPGRQQASATGSIFIPKHTFSVYHVQEELTQEQALNLTKLVNIIEMLLESRSKKDFKQICFFEKLYYTYSISSDEILDLKIWKGPKGKEMSRLKPCNVLSFLYDALKNKNSSLGFWARPPNLLKSSPLAYQQDQNSFNATELPIICSAEVMFVTLLKEIINYLQFINDLCDTFNNEQLIKRHENIWMLIEQRKIGHDFMSVVVGGVEYSLNNWARYEIKRRAAELESVNYYPHCEYIMPEDIVVSILGSKPNCPFLEALKRFHDFLKKRRIIFKGEYLVIPWMGAQDVADMIHHVENRINLDHLEDLAHMLKLITYHRSFDTCINQAFEHLYAFKFPDANIETHELKHIRQLEKKMYGYILRLEKLQTVLTFYIEFLLKQV

SEQ ID NO: 131 - protein, 1353 aa, African swine fever virus
MFGAFVSHRLWSDSGCTTTCITNSIANYVAFGEQIGFPFKSAQVFIAGPRKAVINIQEDDKVELLKMIVKHNLWVVAHGTYLDVPWSRKSAFVTHFIQQELLICKEVGIKGLVLHLGAVEPELIMEGLKKIKPVEGVVIYLETPHNKHHTYKYSTIEQIKELFLRIRNTRLKQIGLCIDTAHIWSSGVNISSYNDAGQWLRSLENIHSVIPPSHIMFHLNDAATECGSGIDRHASLFEGMIWKSYSHKIKQSGLYCFVEYVTRHQCPAILERNLGSSMQLQTALTAEFTTLKSLLKMEDETELCFRSNKVTRLEMFVCTYGGKITSLACSHMELIKMLQIAEPVKALNCNFGHQCLPGYESLIKTPKKTKNMLRRPRKTEGDGTCFNSAIEASILFKDKMYKLKCFPSTGEIQVPGVIFPDFEDGKNIIQQWVDFLQHQPIEKKIQIIEFKTIMINFKFQINPVSPRVIIHLKKFAALLEHIPTPYPIREIKPPLEDSKVSAKFMVSPGKKVRINVFLKGKINILGCNTKESAETIYTFLKDLISVHWQEILCVLPVPDMYSVCDVVRDAVAQSHLCACPNDKLPQCKGVTKAPPKCSVFHVAKLQDTKFKWKYTLDPLKAQKLSQIDKDIEKDAITLKLIYGIELSPEDLEWWKMQRCLINKKTGAKGGQFANKYLERQDLELLGYSPTPIIGGDFMFTALPDKVLRTIPVAWDRFLNPAMMIFFLIILLCVILGIFYVLVRNTLRRKQKSKQHQMEIKRFIKEKEQDPYIHTSFESWPADPNKEWKDLIPVYEAQGYCMADYRKKLGMPPGPNCMKMHIARDSIVFLLNKYLQNTILTNKIEQECFLQADTPKKYLQYIKPFLINCMTKNITTDLVMKDSKRLEPYIILEMRDIIQMMFFRTLQKHMFFKEHTDLCTEYAQKIEASCYHYTYQQQEKTFLEEYSTRCGTINHIINCEKKSHQQQDNDALNKLISGELKPEAIGSMTFAELCPSAALKEKTEITLRSQQKVAEKTSQLYKCPNCKQRMCTYREVQTRALDEPSTIFCTCKKCGHEFIGMEGEELIYHNIINEILVGYIKYYINDISEHELSPYQQQIKKILTYYDECLNKQVTITFSLTSVQEIKTQFTGVVTELFKDLINWGRICGFIVFSAKMAKYCKDANNHLESTVITTAYNFMKHNLLPWMISHGGQEEFLAFSLHSDMYSVIFNIKYFLSKFCNHMFFRSCVQLLRNCNLIMGYTIQLDKDGDYCWDEDPTHHDPYMQANATSHVATSYATTSHAATPHAAAHHTFHEPFIKLNLTDKNIFNGLGFILIVIFIYLLLITLQQMLTRHIYNTVQHCVKAHLDSKNLQ

SEQ ID NO: 132 - protein, 9 aa, African swine fever virus
TIFDETHFY

SEQ ID NO: 133 - protein, 9 aa, African swine fever virus
TLISEMMHY

SEQ ID NO: 134 - protein, 9 aa, African swine fever virus
TTNRRILQY

SEQ ID NO: 135 - protein, 9 aa, African swine fever virus
TQWVQTLKY

SEQ ID NO: 136 - protein, 9 aa, African swine fever virus
WVIKSYLQY

SEQ ID NO: 137 - protein, 9 aa, African swine fever virus
YTLCDSPAY

SEQ ID NO: 138 - protein, 9 aa, African swine fever virus
QLARHAIRY

SEQ ID NO: 139 - protein, 9 aa, African swine fever virus
YIEKYWPGY

SEQ ID NO: 140 - protein, 9 aa, African swine fever virus
MSVSTFWPY

SEQ ID NO: 141 - protein, 9 aa, African swine fever virus
YVATGIPPY

SEQ ID NO: 142 - protein, 9 aa, African swine fever virus
QTSRHTLSY

SEQ ID NO: 143 - protein, 10 aa, African swine fever virus
FTEGVAPAYY

SEQ ID NO: 144 - protein, 9 aa, African swine fever virus
YQDQQWVEV

SEQ ID NO: 145 - protein, 9 aa, African swine fever virus
AIEEEDIQF

SEQ ID NO: 146 - protein, 9 aa, African swine fever virus
DSEFFQPVY

SEQ ID NO: 147 - protein, 9 aa, African swine fever virus
ATNRPATNK

SEQ ID NO: 148 - protein, 9 aa, African swine fever virus
TMSAIENLR

SEQ ID NO: 149 - protein, 9 aa, African swine fever virus
EFFQPVYPR

SEQ ID NO: 150 - protein, 9 aa, African swine fever virus
EDIQFINPY

SEQ ID NO: 151 - protein, 9 aa, African swine fever virus
LSPVTTPSF

SEQ ID NO: 152 - protein, 9 aa, African swine fever virus
QTMSAIENL

SEQ ID NO: 153 - protein, 9 aa, African swine fever virus
NPYQDQQWV

SEQ ID NO: 154 - protein, 9 aa, African swine fever virus
TASQTMSAI

SEQ ID NO: 155 - protein, 9 aa, African swine fever virus
STHMYTILI

SEQ ID NO: 156 - protein, 9 aa, African swine fever virus
RQRNTYTHK

SEQ ID NO: 157 - protein, 9 aa, African swine fever virus
MDSEFFQPV

What is claimed is:

1. An immunogenic composition comprising a chimeric gene comprising at least one nucleic acid sequence encoding for a sequence having at least 80% sequence homology with any one or more of SEQ ID NOS: 1-101, and any combination thereof.

2. The immunogenic composition of claim 1, wherein the chimeric gene includes at least two of said nucleic acid sequences.

3. The immunogenic composition of claim 2, wherein said chimeric gene includes a self-cleaving peptide linker between each of the at least two nucleic acid sequences.

4. The immunogenic composition of claim 1, wherein said immunogenic composition is in the form of a multicistronic cassette.

5. The immunogenic composition of claim 1, wherein said chimeric gene is inserted into a vector.

6. The immunogenic composition of claim 5, wherein said vector is selected from the group consisting of an adenovirus, baculovirus, or lentivirus vector.

7. The immunogenic composition of claim 6, wherein said vector is a single-cycle replicon adenovirus or an attenuated bovine parainfluenza virus type 3 genotype c (BPIV3c).

8. The immunogenic composition of claim 1, wherein said chimeric gene is selected from the group consisting of SEQ ID NOS. 102-131.

9. The immunogenic composition of claim 1, further comprising an antigen from another disease-causing organism.

10. The immunogenic composition of claim 9, wherein said another disease-causing organism is selected from the group consisting of Actinobacillus pleuropneumonia; Adenovirus; Alphavirus such as Eastern equine encephalomyelitis viruses; Bordetella bronchiseptica; Brachyspira spp., preferably B. hyodyentheriae; B. piosicoli, Brucella suis, preferably biovars 1, 2, and 3; Classical swine fever virus; Clostridium spp., preferably Cl. difficile, Cl. perfringens types A, B, and C, Cl. novyi, Cl. septicum, Cl. tetani; Coronavirus, preferably Porcine Respiratory Corona virus; Eperythrozoonosis suis; Erysipelothrix rhsiopathiae; Escherichia coli; Haemophilus parasuis, preferably subtypes 1, 7 and 14: Hemagglutinating encephalomyelitis virus; Japanese Encephalitis Virus; Lawsonia intracellularis; Leptospira spp.; preferably Leptospira australis; Leptospira canicola; Leptospira grippotyphosa; Leptospira icterohaemorrhagicae; and Leptospira interrogans; Leptospira pomona; Leptospira tarassovi; Mycobacterium spp. preferably M. avium; M. intracellulare; and M. bovis; Mycoplasma hyopneumoniae (M hyo); Pasteurella multocida; Porcine circovirus; Porcine cytomegalovirus; Porcine Parvovirus; Porcine Reproductive and Respiratory Syndrome (PRRS) Virus; Pseudorabies virus; Rotavirus; Salmonella spp.; preferably S. thyhimurium; and S. choleraesuis; Staph. hyicus; Staphylococcus spp. preferably Streptococcus spp., preferably Strep. suis; Swine herpes virus; Swine Influenza Virus; Swine pox virus; Swine pox virus; Vesicular stomatitis virus; Virus of vesicular exanthema of swine; Leptospira hardjo; and/or Mycoplasma hyosynoviae.

11. The immunogenic composition of claim 1, further comprising at least one pharmaceutical-acceptable carrier.

12. A immunogenic composition comprising at least one recombinant sequence selected from the group consisting of sequences having at least 80% sequence identity to one of SEQ ID NOS. 1-101.

13. The immunogenic composition of claim 12, further comprising an antigen from another disease-causing organism.

14. The immunogenic composition of claim 13, wherein said another disease-causing organism is selected from the group consisting of Actinobacillus pleuropneumonia; Adenovirus; Alphavirus such as Eastern equine encephalomyelitis viruses; Bordetella bronchiseptica; Brachyspira spp., preferably B. hyodyentheriae; B. piosicoli, Brucella suis, preferably biovars 1, 2, and 3; Classical swine fever virus; Clostridium spp., preferably Cl. difficile, Cl. perfringens types A, B, and C, Cl. novyi, Cl. septicum, Cl. tetani; Coronavirus, preferably Porcine Respiratory Corona virus; Eperythrozoonosis suis; Erysipelothrix rhsiopathiae; Escherichia coli; Haemophilus parasuis, preferably subtypes 1, 7 and 14: Hemagglutinating encephalomyelitis virus; Japanese Encephalitis Virus; Lawsonia intracellularis; Leptospira spp.; preferably Leptospira australis; Leptospira canicola; Leptospira grippotyphosa; Leptospira icterohaemorrhagicae; and Leptospira interrogans; Leptospira pomona; Leptospira tarassovi; Mycobacterium spp. preferably M. avium; M. intracellulare; and M. bovis; Mycoplasma hyopneumoniae (M hyo); Pasteurella multocida; Porcine circovirus; Porcine cytomegalovirus; Porcine Parvovirus; Porcine Reproductive and Respiratory Syndrome (PRRS) Virus; Pseudorabies virus; Rotavirus; Salmonella spp.; preferably S. thyhimurium; and S. choleraesuis; Staph. hyicus; Staphylococcus spp. preferably Streptococcus spp., preferably Strep. suis; Swine herpes virus; Swine Influenza Virus; Swine pox virus; Swine pox virus; Vesicular stomatitis virus; Virus of vesicular exanthema of swine; Leptospira hardjo; and/or Mycoplasma hyosynoviae.

15. The immunogenic composition of claim 12, further comprising at least one pharmaceutical-acceptable carrier.
